(19) United States
(12) Patent Application Publication
(10) Pub. No.: US 2009/0162350 A1
(43) Pub. Date: Jun. 25, 2009

(54) NOVEL COMPOSITION AND METHODS FOR THE TREATMENT OF IMMUNE RELATED DISEASE

(76) Inventors: Alexander Abbas, Belmont, CA (US); Hilary Clark, San Francisco, CA (US); P. Mickey Williams, Emerald Hills, CA (US); William I. Wood, Cupertino, CA (US)

Correspondence Address: GOODWIN PROCTER LLP, 135 COMMONWEALTH DRIVE, MENLO PARK, CA, 94025, US

(21) Appl. No.: 11/573,629

(22) PCT Filed: Jul. 29, 2005
(86) PCT No.: PCT/US05/26966

§ 371 Date: Oct. 29, 2008

Related U.S. Application Data
(60) Provisional application No. 60/600,991, filed on Aug. 12, 2004.

(51) Int. Cl. A61K 39/395; C07K 14/47; G01N 33/566; C12Q 1/68; C12Q 1/02; C07K 16/18; A61K 38/17

(52) U.S. Cl. 424/133.1; 530/350; 436/501; 435/6; 435/7.1; 435/29; 530/387.9; 530/387.3; 424/139.1; 514/12

(57) ABSTRACT

The present invention relates to compositions containing a novel protein and methods of using those compositions for the diagnosis and treatment of immune related disease.

### RELATED APPLICATIONS

[0001] This is a §371 application claiming priority under 35 USC §120 to PCT International application No. PCT/US2005/026966 filed on Jul. 9, 2005 and under §119(e) to provisional application Ser. No. 60/600,991 filed on Aug. 12, 2004, the entire disclosures of which are hereby incorporated by reference.

### FIELD OF THE INVENTION

[0002] The present invention relates to compositions and methods useful for the diagnosis and alleviation of immune related disease.

### BACKGROUND OF THE INVENTION

[0003] Immune related and inflammatory diseases are the manifestation or consequence of fairly complex, often multiple interconnected biological pathways which in normal physiology are critical to respond to insult or injury, initiate repair from insult or injury, and mount innate and acquired defense against foreign organisms. Disease or pathology occurs when these normal physiological pathways cause additional insult or injury either as directly related to the intensity of the response, as a consequence of abnormal regulation or excessive stimulation, as a reaction to self, or as a combination of these.

[0004] Though the genesis of these diseases often involves multistep pathways and often multiple different biological systems/pathways, intervention at critical points in one or more of these pathways can have an ameliorative or therapeutic effect. Therapeutic intervention can occur by either antagonism of a detrimental process/pathway or stimulation of a beneficial process/pathway.

[0005] Many immune related diseases are known and have been extensively studied. Such diseases include immune-mediated inflammatory diseases, non-immune-mediated inflammatory diseases, infectious diseases, immunodeficiency diseases, neoplasia, etc.

[0006] T lymphocytes (T cells) are an important component of a mammalian immune response. T cells recognize antigens which are associated with a self-molecule encoded by genes within the major histocompatibility complex (MHC). The antigen may be displayed together with MHC molecules on the surface of antigen presenting cells, virus infected cells, cancer cells, grafts, etc. The T cell system eliminates these altered cells which pose a health threat to the host mammal. T cells include helper T cells and cytotoxic T cells. Helper T cells proliferate extensively following recognition of an antigen-MHC complex on an antigen presenting cell. Helper T cells also secrete a variety of cytokines, i.e., lymphokines, which play a central role in the activation of B cells, cytotoxic T cells and a variety of other cells which participate in the immune response.

[0007] Systemic Lupus Erythematosus (SLE) is an autoimmune diseases characterized by chronic relapsing inflammation of various tissue sites, primarily kidney, which result in tissue destruction. SLE is more common in women and genetic susceptibility is thought to contribute to the dysregulation of the immune system. Animal studies as well as human clinical experience have also demonstrated that environmental factors also contribute to these diseases. While the etiology and pathogenesis of SLE is still poorly understood, B cells, T cells and monocytes have all been implicated as playing critical roles in disease progression. Therapeutics know to target these cell types have been shown to impact disease progression in human as well as animal studies. Analysis of the gene expression patterns of white blood cells from healthy individuals compared to SLE patients was carried out using Affymetrix® GeneChips®. The identification of genes that are differentially expressed in disease vs healthy cells is likely to provide important information as to the role of these gene products in the pathogenesis of disease. These disease associated genes may be used as targets or therapies for the treatment of SLE and other autoimmune mediated inflammatory diseases and may include the gene products themselves as well as antibody, peptide or small molecule antagonists. The identification of genes that are differentially expressed in disease vs healthy cells is likely to provide important information as to the role of these gene products in the pathogenesis of disease. These disease associated genes may be used as targets or therapies for the treatment of SLE and other autoimmune mediated inflammatory diseases and may include the gene products themselves as well as antibody, peptide or small molecule antagonists.

[0008] Rheumatoid Arthritis (RA) is an autoimmune disease characterized by chronic relapsing inflammation of various tissue sites, primarily bone and joint, which result in tissue destruction. RA is more common in women and genetic susceptibility is thought to contribute to the dysregulation of the immune system. Animal studies as well as human clinical experience have also demonstrated that environmental factors also contribute to these diseases. While the etiology and pathogenesis of RA is still poorly understood, B cells, T cells and monocytes have all been implicated as playing critical roles in disease progression. Therapeutics know to target these cell types have been shown to impact disease progression in human as well as animal studies. Analysis of the gene expression patterns of white blood cells from healthy individuals compared to RA patients was carried out using DNA microarrays. The identification of genes that are differentially expressed in disease vs healthy cells is likely to provide important information as to the role of these gene products in the pathogenesis of disease. These disease associated genes may be used as targets or therapies for the treatment of RA and other autoimmune mediated inflammatory diseases and may include the gene products themselves as well as antibody, peptide or small molecule antagonists.

[0009] Several diseases of the skin are correlated with an aberrant T cell response and to autoimmunity. Psoriasis is thought to be an autoimmune disease. Specifically, T-cells of the immune system recognize a protein in the skin and attack the area where that protein is found, causing the too-rapid growth of new skin cells and painful, elevated, scaly lesions. These lesions are characterized by hyperproliferation of keratinocytes and the accumulation of activated T-cells in the epidermis of the psoriatic lesions. There are several forms of psoriasis; guttate is the one that most commonly occurs in children and teens. It is sometimes preceded by an upper respiratory infection. Guttate psoriasis is noncontagious and characterized by small drop-like lesions, usually scattered over the trunk, limbs and scalp. According to the National Psoriasis Foundation, approximately seven million people in the United States have psoriasis. About 20,000 children are diagnosed with psoriasis annually, and many of the cases are attributed to upper respiratory infections. It is estimated that only about 1.5 million people with psoriasis actually seek treatment, primarily due to lack of or dissatisfaction with current treatments Although the initial molecular cause of disease is unknown, genetic linkages have been mapped to at least 7 psoriasis susceptibility loci (Psor1 on 6p21.3, Psor2 on 17q, Psor3 on 4q, Psor4 on 1 cent-q21, Psor5 on 3q21, Psor6 on 19 p13, and Psor7 on 1p). Some of these loci overlap with other autoimmune/inflammatory diseases including rheumatoid arthritis, atopic dermatitis, and irritable bowel disease. In this application, experiments determine that a gene is upregulated in psoriatic skin vs. normal skin.

[0010] The term inflammatory bowel disorder (“IBD”) describes a group of chronic inflammatory disorders of unknown causes in which the intestine (bowel) becomes inflamed, often causing recurring cramps or diarrhea. The prevalence of IBD in the US is estimated to be about 200 per 100,000 population. Patients with IBD can be divided into two major groups, those with ulcerative colitis (“UC”) and those with Crohn's disease (“CD”).

[0011] In patients with UC, there is an inflammatory reaction primarily involving the colonic mucosa. The inflammation is typically uniform and continuous with no intervening areas of normal mucosa. Surface mucosal cells as well as crypt epithelium and submucosa are involved in an inflammatory reaction with neutrophil infiltration. Ultimately, this situation typically progresses to epithelial damage with loss of epithelial cells resulting in multiple ulcerations, fibrosis, dysplasia and longitudinal retraction of the colon.

[0012] CD differs from UC in that the inflammation extends through all layers of the intestinal wall and involves mesentery as well as lymph nodes. CD may affect any part of the alimentary canal from mouth to anus. The disease is often discontinuous, i.e., severely diseased segments of bowel are separated from apparently disease-free areas. In CD, the bowel wall also thickens which can lead to obstructions. In addition, fistulas and fissures are not uncommon.

[0013] Clinically, IBD is characterized by diverse manifestations often resulting in a chronic, unpredictable course. Bloody diarrhea and abdominal pain are often accompanied by fever and weight loss. Anemia is not uncommon, as is severe fatigue. Joint manifestations ranging from arthralgia to acute arthritis as well as abnormalities in liver function are commonly associated with IBD. Patients with IBD also have an increased risk of colon carcinomas compared to the general population. During acute “attacks” of IBD, work and other normal activity are usually impossible, and often a patient is hospitalized.

[0014] Although the cause of IBD remains unknown, several factors such as genetic, infectious and immunologic susceptibility have been implicated. IBD is much more common in Caucasians, especially those of Jewish descent. The chronic inflammatory nature of the condition has prompted an intense search for a possible infectious cause. Although agents have been found which stimulate acute inflammation, none has been found to cause the chronic inflammation associated with IBD. The hypothesis that IBD is an autoimmune disease is supported by the previously mentioned extraintestinal manifestation of IBD as joint arthritis, and the known positive response to IBD by treatment with therapeutic agents such as adrenal glucocorticoids, cyclosporine and azathioprine, which are known to suppress immune response. In addition, the GI tract, more than any other organ of the body, is continuously exposed to potential antigenic substances such as proteins from food, bacterial byproducts (LPS), etc.

[0015] Once the diagnosis has been made, typically by endoscopy, the goals of therapy are to induce and maintain a remission. The least toxic agents which patients are typically treated with are the aminosalicylates. Sulfasalazine (Azulfidine), typically administered four times a day, consists of an active molecule of aminosalicylate (5-ASA) which is linked by an azo bond to a sulfapyridine. Anaerobic bacteria in the colon split the azo bond to release active 5-ASA. However, at least 20% of patients cannot tolerate sulfapyridine because it is associated with significant side-effects such as reversible sperm abnormalities, dyspepsia or allergic reactions to the sulpha component. These side effects are reduced in patients taking olsalazine. However, neither sulfasalazine nor olsalazine are effective for the treatment of small bowel inflammation. Other formulations of 5-ASA have been developed which are released in the small intestine (e.g. mesalamine and asacol). Normally it takes 6-8 weeks for 5-ASA therapy to show full efficacy. Patients who do not respond to 5-ASA therapy, or who have a more severe disease, are prescribed corticosteroids. However, this is a short term therapy and cannot be used as a maintenance therapy. Clinical remission is achieved with corticosteroids within 2-4 weeks, however the side effects are significant and include a Cushing goldface, facial hair, severe mood swings and sleeplessness. The response to sulfasalazine and 5-aminosalicylate preparations is poor in Crohn's disease, fair to mild in early ulcerative colitis and poor in severe ulcerative colitis. If these agents fail, powerful immunosuppressive agents such as cyclosporine, prednisone, 6-mercaptopurine or azathioprine (converted in the liver to 6-mercaptopurine) are typically tried. For Crohn's disease patients, the use of corticosteroids and other immunosuppressives must be carefully monitored because of the high risk of intra-abdominal sepsis originating in the fistulas and abscesses common in this disease. Approximately 25% of IBD patients will require surgery (colectomy) during the course of the disease.

[0016] Further, the risk of colon cancer is elevated (≧32×) in patients with severe ulcerative colitis, particularly if the disease has existed for several years. About 20-25% of patients with IBD eventually require surgery for removal of the colon because of massive bleeding, chronic debilitating illness, performation of the colon, or risk of cancer. Surgery is also sometimes performed when other forms of medical treatment fail or when the side effects of steroids or other medications threaten the patient's health. As surgery is invasive and drastically life altering, it is not a highly desirable treatment regimen, and is typically the treatment of last resort.

[0017] In addition to pharmaceutical medicine and surgery, nonconventional treatments for IBD such as nutritional therapy have also been attempted. For example, Flexical®, a semi-elemental formula, has been shown to be as effective as the steroid prednisolone. Sanderson et al., Arch. Dis. Child. 51:123-7 (1987). However, semi-elemental formulas are relatively expensive and are typically unpalatable—thus their use has been restricted. Nutritional therapy incorporating whole proteins has also been attempted to alleviate the symptoms of IBD. Giafer et al., Lancet 335: 816-9 (1990). U.S. Pat. No. 5,461,033 describes the use of acidic casein isolated from bovine milk and TGF-2. Beattie et al., Aliment Pharmacol. Ther. 8: 1-6 (1994) describes the use of casein in infant formula in children with IBD. U.S. Pat. No. 5,952,295 describes the use of casein in an enteric formulation for the treatment of IBD. However, while nutritional therapy is non-toxic, it is only a palliative treatment and does not treat the underlying cause of the disease.

[0018] Despite the above identified advances in immune research, there is a great need for additional diagnostic and therapeutic agents capable of detecting the presence of an immune related disease in a mammal and for effectively inhibiting these disorders. Accordingly, it is an objective of the present invention to identify polypeptides that are overexpressed in immune related disease states as compared to normal tissue, and to use those polypeptides, and their encoding nucleic acids, to produce compositions of matter useful in the therapeutic treatment and diagnostic detection of immune related disease in mammals.

### SUMMARY OF THE INVENTION

### A. Embodiments

[0019] The present invention concerns compositions and methods useful for the diagnosis and treatment of immune related disease in mammals, including humans. The present invention is based on the identification of proteins (including agonist and antagonist antibodies) which are a result of immune related disease in mammals. Immune related diseases such as psoriasis or IBD may be treated by suppressing the immune response. Molecules that enhance the immune response stimulate or potentiate the immune response to an antigen. Molecules which stimulate the immune response can be used therapeutically where enhancement of the immune response would be beneficial. Alternatively, molecules that suppress the immune response attenuate or reduce the immune response to an antigen (e.g., neutralizing antibodies) can be used therapeutically where attenuation of the immune response would be beneficial (e.g. inflammation). Accordingly, the PRO polypeptides, agonists and antagonists thereof are also useful to prepare medicines and medicaments for the treatment of immune related disease. In a specific aspect, such medicines and medicaments comprise a therapeutically effective amount of a PRO polypeptide, agonist or antagonist thereof with a pharmaceutically acceptable carrier. Preferably, the admixture is sterile.

[0020] In a further embodiment, the invention concerns a method of identifying agonists or antagonists to a PRO polypeptide which comprises contacting the PRO polypeptide with a candidate molecule and monitoring a biological activity mediated by said PRO polypeptide. Preferably, the PRO polypeptide is a native sequence PRO polypeptide. In a specific aspect, the PRO agonist or antagonist is an anti-PRO antibody.

[0021] In another embodiment, the invention concerns a composition of matter comprising a PRO polypeptide or an agonist or antagonist antibody which binds the polypeptide in admixture with a carrier or excipient. In one aspect, the composition comprises a therapeutically effective amount of the polypeptide or antibody. In a further aspect, when the composition comprises a immune related disease inhibiting molecule, the composition is useful for: (a) reducing the amount of psoriasis or affected colon tissue in a mammal in need thereof, (b) inhibiting or reducing an auto-immune response in a mammal in need thereof, In another aspect, the composition comprises a further active ingredient, which may, for example, be a further antibody or a cytotoxic or chemotherapeutic agent. Preferably, the composition is sterile.

[0022] In another embodiment, the invention concerns a method of treating immune related disease in a mammal in need thereof, comprising administering to the mammal an effective amount of a PRO polypeptide, an agonist thereof, or an antagonist thereto.

[0023] In another embodiment, the invention provides an antibody which specifically binds to any of the above or below described polypeptides. Optionally, the antibody is a monoclonal antibody, humanized antibody, antibody fragment or single-chain antibody. In one aspect, the present invention concerns an isolated antibody which binds a PRO polypeptide. In another aspect, the antibody mimics the activity of a PRO polypeptide (an agonist antibody) or conversely the antibody inhibits or neutralizes the activity of a PRO polypeptide (an antagonist antibody). In another aspect, the antibody is a monoclonal antibody, which preferably has nonhuman complementarity determining region (CDR) residues and human framework region (FR) residues. The antibody may be labeled and may be immobilized on a solid support. In a further aspect, the antibody is an antibody fragment, a monoclonal antibody, a single-chain antibody, or an anti-idiotypic antibody.

[0024] In yet another embodiment, the present invention provides a composition comprising an anti-PRO antibody in admixture with a pharmaceutically acceptable carrier. In one aspect, the composition comprises a therapeutically effective amount of the antibody. Preferably, the composition is sterile. The composition may be administered in the form of a liquid pharmaceutical formulation, which may be preserved to achieve extended storage stability. Alternatively, the antibody is a monoclonal antibody, an antibody fragment, a humanized antibody, or a single-chain antibody.

[0025] In a further embodiment, the invention concerns an article of manufacture, comprising:

[0026] (a) a composition of matter comprising a PRO polypeptide or agonist or antagonist thereof;

[0027] (b) a container containing said composition; and

[0028] (c) a label affixed to said container, or a package insert included in said container referring to the use of said PRO polypeptide or agonist or antagonist thereof in the treatment of an immune related disease. The composition may comprise a therapeutically effective amount of the PRO polypeptide or the agonist or antagonist thereof.

[0029] In another embodiment, the invention concerns a method of treating an immune related disorder in a mammal in need thereof, comprising administering to the mammal an effective amount of a PRO polypeptide, an agonist thereof, or an antagonist thereto. In a preferred aspect, the immune related disorder is selected from the group consisting of: systemic lupus erythematosis, X-linked infantile hypogammaglobulinemia, polysaccaride antigen unresponsiveness, selective IgA deficiency, selective IgM deficiency, selective deficiency of IgG subclasses, immunodeficiency with hyper Ig-M, transient hypogammaglobulinemia of infancy, Burkitt's lymphoma, Intermediate lymphoma, follicular lymphoma, typeII hypersensitivity, rheumatoid arthritis, autoimmune mediated hemolytic anemia, myesthenia gravis, hypoadrenocorticism, glomerulonephritis and ankylosing spondylitis.

[0030] In a further embodiment, the invention concerns a method of treating an immune related disorder in a mammal in need thereof, comprising administering to the mammal an effective amount of a PRO polypeptide, an agonist thereof, or an antagonist thereto. In a preferred aspect, the immune related disorder is selected from the group consisting of: systemic lupus erythematosis, rheumatoid arthritis, osteoarthritis, juvenile chronic arthritis, a spondyloarthropathy, systemic sclerosis, an idiopathic inflammatory myopathy, Sjögren's syndrome, systemic vasculitis, sarcoidosis, autoimmune hemolytic anemia, autoimmune thrombocytopenia, thyroiditis, diabetes mellitus, immune-mediated renal disease, a demyelinating disease of the central or peripheral nervous system, idiopathic demyelinating polyneuropathy, Guillain-Barré syndrome, a chronic inflammatory demyelinating polyneuropathy, a hepatobiliary disease, infectious or autoimmune chronic active hepatitis, primary biliary cirrhosis, granulomatous hepatitis, sclerosing cholangitis, inflammatory bowel disease, gluten-sensitive enteropathy, Whipple's disease, an autoimmune or immune-mediated skin disease, a bullous skin disease, erythema multiforme, contact dermatitis, psoriasis, an allergic disease, asthma, allergic rhinitis, atopic dermatitis, food hypersensitivity, urticaria, an immunologic disease of the lung, eosinophilic pneumonias, idiopathic pulmonary fibrosis, hypersensitivity pneumonitis, a transplantation associated disease, graft rejection or graft-versus-host-disease.

[0031] In yet another embodiment, the present invention concerns a method of diagnosing immune related disease in a mammal, comprising detecting the level of expression of a gene encoding a PRO polypeptide (a) in a test sample of tissue cells obtained from the mammal, and (b) in a control sample of known normal tissue cells of the same cell type, wherein a higher or lower expression level in the test sample as compared to the control sample indicates the presence of immune related disease in the mammal from which the test tissue cells were obtained.

[0032] In another embodiment, the present invention concerns a method of diagnosing immune related disease in a mammal, comprising (a) contacting an anti-PRO antibody with a test sample of tissue cells obtained from the mammal, and (b) detecting the formation of a complex between the antibody and a PRO polypeptide, in the test sample; wherein the formation of said complex is indicative of the presence or absence of said immune related disease. The detection may be qualitative or quantitative, and may be performed in comparison with monitoring the complex formation in a control sample of known normal tissue cells of the same cell type. A larger quantity of complexes formed in the test sample indicates the presence or absence of immune related disease in the mammal from which the test tissue cells were obtained. The antibody preferably carries a detectable label. Complex formation can be monitored, for example, by light microscopy, flow cytometry, fluorimetry, or other techniques known in the art. The test sample is usually obtained from an individual suspected of having immune related disease.

[0033] In another embodiment, the invention provides a method for determining the presence of a PRO polypeptide in a sample comprising exposing a test sample of cells suspected of containing the PRO polypeptide to an anti-PRO antibody and determining the binding of said antibody to said cell sample. In a specific aspect, the sample comprises a cell suspected of containing the PRO polypeptide and the antibody binds to the cell. The antibody is preferably detectably labeled and/or bound to a solid support.

[0034] In another embodiment, the present invention concerns an immune related disease diagnostic kit, comprising an anti-PRO antibody and a carrier in suitable packaging. The kit preferably contains instructions for using the antibody to detect the presence of the PRO polypeptide. Preferably the carrier is pharmaceutically acceptable.

[0035] In another embodiment, the present invention concerns a diagnostic kit, containing an anti-PRO antibody in suitable packaging. The kit preferably contains instructions for using the antibody to detect the PRO polypeptide.

[0036] In another embodiment, the invention provides a method of diagnosing an immune related disease in a mammal which comprises detecting the presence or absence or a PRO polypeptide in a test sample of tissue cells obtained from said mammal, wherein the presence or absence of the PRO polypeptide in said test sample is indicative of the presence of immune related disease in said mammal.

[0037] In another embodiment, the present invention concerns a method for identifying an agonist of a PRO polypeptide comprising:

[0038] (a) contacting cells and a test compound to be screened under conditions suitable for the induction of a cellular response normally induced by a PRO polypeptide; and

[0039] (b) determining the induction of said cellular response to determine if the test compound is an effective agonist, wherein the induction of said cellular response is indicative of said test compound being an effective agonist.

[0040] In another embodiment, the invention concerns a method for identifying a compound capable of inhibiting the activity of a PRO polypeptide comprising contacting a candidate compound with a PRO polypeptide under conditions and for a time sufficient to allow these two components to interact and determining whether the activity of the PRO polypeptide is inhibited. In a specific aspect, either the candidate compound or the PRO polypeptide is immobilized on a solid support. In another aspect, the non-immobilized component carries a detectable label. In a preferred aspect, this method comprises the steps of:
[0041] (a) contacting cells and a test compound to be screened in the presence of a PRO polypeptide under conditions suitable for the induction of a cellular response normally induced by a PRO polypeptide; and
[0042] (b) determining the induction of said cellular response to determine if the test compound is an effective antagonist.

[0043] In another embodiment, the invention provides a method for identifying a compound that inhibits the expression of a PRO polypeptide in cells that normally express the polypeptide, wherein the method comprises contacting the cells with a test compound and determining whether the expression of the PRO polypeptide is inhibited. In a preferred aspect, this method comprises the steps of:

[0044] (a) contacting cells and a test compound to be screened under conditions suitable for allowing expression of the PRO polypeptide; and

[0045] (b) determining the inhibition of expression of said polypeptide.

[0046] In yet another embodiment, the present invention concerns a method for treating immune related disease in a mammal that suffers therefrom comprising administering to the mammal a nucleic acid molecule that codes for either (a) a PRO polypeptide, (b) an agonist of a PRO polypeptide or (c) an antagonist of a PRO polypeptide, wherein said agonist or antagonist may be an anti-PRO antibody. In a preferred embodiment, the mammal is human. In another preferred embodiment, the nucleic acid is administered via ex vivo gene therapy. In a further preferred embodiment, the nucleic acid is comprised within a vector, more preferably an adenoviral, adeno-associated viral, lentiviral or retroviral vector.

[0047] In yet another aspect, the invention provides a recombinant viral particle comprising a viral vector consisting essentially of a promoter, nucleic acid encoding (a) a PRO polypeptide, (b) an agonist polypeptide of a PRO polypeptide, or (c) an antagonist polypeptide of a PRO polypeptide, and a signal sequence for cellular secretion of the polypeptide, wherein the viral vector is in association with viral structural proteins. Preferably, the signal sequence is from a mammal, such as from a native PRO polypeptide.

[0048] In a still further embodiment, the invention concerns an ex vivo producer cell comprising a nucleic acid construct that expresses retroviral structural proteins and also comprises a retroviral vector consisting essentially of a promoter, nucleic acid encoding (a) a PRO polypeptide, (b) an agonist polypeptide of a PRO polypeptide or (c) an antagonist polypeptide of a PRO polypeptide, and a signal sequence for cellular secretion of the polypeptide, wherein said producer cell packages the retroviral vector in association with the structural proteins to produce recombinant retroviral particles.

### B. Additional Embodiments

[0049] In other embodiments of the present invention, the invention provides vectors comprising DNA encoding any of the herein described polypeptides. Host cell comprising any such vector are also provided. By way of example, the host cells may be CHO cells, E. coli, or yeast. A process for producing any of the herein described polypeptides is further provided and comprises culturing host cells under conditions suitable for expression of the desired polypeptide and recovering the desired polypeptide from the cell culture.

[0050] In other embodiments, the invention provides chimeric molecules comprising any of the herein described polypeptides fused to a heterologous polypeptide or amino acid sequence. Example of such chimeric molecules comprise any of the herein described polypeptides fused to an epitope tag sequence or a Fc region of an immunoglobulin.

[0051] In another embodiment, the invention provides an antibody which specifically binds to any of the above or below described polypeptides. Optionally, the antibody is a monoclonal antibody, humanized antibody, antibody fragment or single-chain antibody.

[0052] In yet other embodiments, the invention provides oligonucleotide probes useful for isolating genomic and cDNA nucleotide sequences or as antisense probes, wherein those probes may be derived from any of the above or below described nucleotide sequences.

[0053] In other embodiments, the invention provides an isolated nucleic acid molecule comprising a nucleotide sequence that encodes a PRO polypeptide.

[0054] In one aspect, the isolated nucleic acid molecule comprises a nucleotide sequence having at least about 80% nucleic acid sequence identity, alternatively at least about 81% nucleic acid sequence identity, alternatively at least about 82% nucleic acid sequence identity, alternatively at least about 83% nucleic acid sequence identity, alternatively at least about 84% nucleic acid sequence identity, alternatively at least about 85% nucleic acid sequence identity, alternatively at least about 86% nucleic acid sequence identity, alternatively at least about 87% nucleic acid sequence identity, alternatively at least about 88% nucleic acid sequence identity, alternatively at least about 89% nucleic acid sequence identity, alternatively at least about 90% nucleic acid sequence identity, alternatively at least about 91% nucleic acid sequence identity, alternatively at least about 92% nucleic acid sequence identity, alternatively at least about 93% nucleic acid sequence identity, alternatively at least about 94% nucleic acid sequence identity, alternatively at least about 95% nucleic acid sequence identity, alternatively at least about 96% nucleic acid sequence identity, alternatively at least about 97% nucleic acid sequence identity, alternatively at least about 98% nucleic acid sequence identity and alternatively at least about 99% nucleic acid sequence identity to (a) a DNA molecule encoding a PRO polypeptide having a full-length amino acid sequence as disclosed herein, an amino acid sequence lacking the signal peptide as disclosed herein, an extracellular domain of a transmembrane protein, with or without the signal peptide, as disclosed herein or any other specifically defined fragment of the full-length amino acid sequence as disclosed herein, or (b) the complement of the DNA molecule of (a).

[0055] In other aspects, the isolated nucleic acid molecule comprises a nucleotide sequence having at least about 80% nucleic acid sequence identity, alternatively at least about 81% nucleic acid sequence identity, alternatively at least about 82% nucleic acid sequence identity, alternatively at least about 83% nucleic acid sequence identity, alternatively at least about 84% nucleic acid sequence identity, alternatively at least about 85% nucleic acid sequence identity, alternatively at least about 86% nucleic acid sequence identity, alternatively at least about 87% nucleic acid sequence identity, alternatively at least about 88% nucleic acid sequence identity, alternatively at least about 89% nucleic acid sequence identity, alternatively at least about 90% nucleic acid sequence identity, alternatively at least about 91% nucleic acid sequence identity, alternatively at least about 92% nucleic acid sequence identity, alternatively at least about 93% nucleic acid sequence identity, alternatively at least about 94% nucleic acid sequence identity, alternatively at least about 95% nucleic acid sequence identity, alternatively at least about 96% nucleic acid sequence identity, alternatively at least about 97% nucleic acid sequence identity, alternatively at least about 98% nucleic acid sequence identity and alternatively at least about 99% nucleic acid sequence identity to (a) a DNA molecule comprising the coding sequence of a full-length PRO polypeptide cDNA as disclosed herein, the coding sequence of a PRO polypeptide lacking the signal peptide as disclosed herein, the coding sequence of an extracellular domain of a transmembrane PRO polypeptide, with or without the signal peptide, as disclosed herein or the coding sequence of any other specifically defined fragment of the full-length amino acid sequence as disclosed herein, or (b) the complement of the DNA molecule of (a).

[0056] In a further aspect, the invention concerns an isolated nucleic acid molecule comprising a nucleotide sequence having at least about 80% nucleic acid sequence identity, alternatively at least about 81% nucleic acid sequence identity, alternatively at least about 82% nucleic acid sequence identity, alternatively at least about 83% nucleic acid sequence identity, alternatively at least about 84% nucleic acid sequence identity, alternatively at least about 85% nucleic acid sequence identity, alternatively at least about 86% nucleic acid sequence identity, alternatively at least about 87% nucleic acid sequence identity, alternatively at least about 88% nucleic acid sequence identity, alternatively at least about 89% nucleic acid sequence identity, alternatively at least about 90% nucleic acid sequence identity, alternatively at least about 91% nucleic acid sequence identity, alternatively at least about 92% nucleic acid sequence identity, alternatively at least about 93% nucleic acid sequence identity, alternatively at least about 94% nucleic acid sequence identity, alternatively at least about 95% nucleic acid sequence identity, alternatively at least about 96% nucleic acid sequence identity, alternatively at least about 97% nucleic acid sequence identity, alternatively at least about 98% nucleic acid sequence identity and alternatively at least about 99% nucleic acid sequence identity to (a) a DNA molecule that encodes the same mature polypeptide encoded by any of the human protein cDNAs as disclosed herein, or (b) the complement of the DNA molecule of (a).

[0057] Another aspect the invention provides an isolated nucleic acid molecule comprising a nucleotide sequence encoding a PRO polypeptide which is either transmembrane domain-deleted or transmembrane domain-inactivated, or is complementary to such encoding nucleotide sequence, wherein the transmembrane domain(s) of such polypeptide are disclosed herein. Therefore, soluble extracellular domains of the herein described PRO polypeptides are contemplated.

[0058] Another embodiment is directed to fragments of a PRO polypeptide coding sequence, or the complement thereof, that may find use as, for example, hybridization probes, for encoding fragments of a PRO polypeptide that may optionally encode a polypeptide comprising a binding site for an anti-PRO antibody or as antisense oligonucleotide probes. Such nucleic acid fragments are usually at least about 20 nucleotides in length, alternatively at least about 30 nucleotides in length, alternatively at least about 40 nucleotides in length, alternatively at least about 50 nucleotides in length, alternatively at least about 60 nucleotides in length, alternatively at least about 70 nucleotides in length, alternatively at least about 80 nucleotides in length, alternatively at least about 90 nucleotides in length, alternatively at least about 100 nucleotides in length, alternatively at least about 110 nucleotides in length, alternatively at least about 120 nucleotides in length, alternatively at least about 130 nucleotides in length, alternatively at least about 140 nucleotides in length, alternatively at least about 150 nucleotides in length, alternatively at least about 160 nucleotides in length, alternatively at least about 170 nucleotides in length, alternatively at least about 180 nucleotides in length, alternatively at least about 190 nucleotides in length, alternatively at least about 200 nucleotides in length, alternatively at least about 250 nucleotides in length, alternatively at least about 300 nucleotides in length, alternatively at least about 350 nucleotides in length, alternatively at least about 400 nucleotides in length, alternatively at least about 450 nucleotides in length, alternatively at least about 500 nucleotides in length, alternatively at least about 600 nucleotides in length, alternatively at least about 700 nucleotides in length, alternatively at least about 800 nucleotides in length, alternatively at least about 900 nucleotides in length and alternatively at least about 1000 nucleotides in length, wherein in this context the term “about” means the referenced nucleotide sequence length plus or minus 10% of that referenced length. It is noted that novel fragments of a PRO polypeptide-encoding nucleotide sequence may be determined in a routine manner by aligning the PRO polypeptide-encoding nucleotide sequence with other known nucleotide sequences using any of a number of well known sequence alignment programs and determining which PRO polypeptide-encoding nucleotide sequence fragment(s) are novel. All of such PRO polypeptide-encoding nucleotide sequences are contemplated herein. Also contemplated are the PRO polypeptide fragments encoded by these nucleotide molecule fragments, preferably those PRO polypeptide fragments that comprise a binding site for an anti-PRO antibody.

[0059] In another embodiment, the invention provides isolated PRO polypeptide encoded by any of the isolated nucleic acid sequences herein above identified.

[0060] In a certain aspect, the invention concerns an isolated PRO polypeptide, comprising an amino acid sequence having at least about 80% amino acid sequence identity, alternatively at least about 81% amino acid sequence identity, alternatively at least about 82% amino acid sequence identity, alternatively at least about 83% amino acid sequence identity, alternatively at least about 84% amino acid sequence identity, alternatively at least about 85% amino acid sequence identity, alternatively at least about 86% amino acid sequence identity, alternatively at least about 87% amino acid sequence identity, alternatively at least about 88% amino acid sequence identity, alternatively at least about 89% amino acid sequence identity, alternatively at least about 90% amino acid sequence identity, alternatively at least about 91% amino acid sequence identity, alternatively at least about 92% amino acid sequence identity, alternatively at least about 93% amino acid sequence identity, alternatively at least about 94% amino acid sequence identity, alternatively at least about 95% amino acid sequence identity, alternatively at least about 96% amino acid sequence identity, alternatively at least about 97% amino acid sequence identity, alternatively at least about 98% amino acid sequence identity and alternatively at least about 99% amino acid sequence identity to a PRO polypeptide having a full-length amino acid sequence as disclosed herein, an amino acid sequence lacking the signal peptide as disclosed herein, an extracellular domain of a transmembrane protein, with or without the signal peptide, as disclosed herein or any other specifically defined fragment of the full-length amino acid sequence as disclosed herein.

[0061] In a further aspect, the invention concerns an isolated PRO polypeptide comprising an amino acid sequence having at least about 80% amino acid sequence identity, alternatively at least about 81% amino acid sequence identity, alternatively at least about 82% amino acid sequence identity, alternatively at least about 83% amino acid sequence identity, alternatively at least about 84% amino acid sequence identity, alternatively at least about 85% amino acid sequence identity, alternatively at least about 86% amino acid sequence identity, alternatively at least about 87% amino acid sequence identity, alternatively at least about 88% amino acid sequence identity, alternatively at least about 89% amino acid sequence identity, alternatively at least about 90% amino acid sequence identity, alternatively at least about 91% amino acid sequence identity, alternatively at least about 92% amino acid sequence identity, alternatively at least about 93% amino acid sequence identity, alternatively at least about 94% amino acid sequence identity, alternatively at least about 95% amino acid sequence identity, alternatively at least about 96% amino acid sequence identity, alternatively at least about 97% amino acid sequence identity, alternatively at least about 98% amino acid sequence identity and alternatively at least about 99% amino acid sequence identity to an amino acid sequence encoded by any of the human protein cDNAs as disclosed herein.

[0062] In a specific aspect, the invention provides an isolated PRO polypeptide without the N-terminal signal sequence and/or the initiating methionine and is encoded by a nucleotide sequence that encodes such an amino acid sequence as herein before described. Processes for producing the same are also herein described, wherein those processes comprise culturing a host cell comprising a vector which comprises the appropriate encoding nucleic acid molecule under conditions suitable for expression of the PRO polypeptide and recovering the PRO polypeptide from the cell culture.

[0063] Another aspect the invention provides an isolated PRO polypeptide which is either transmembrane domain-deleted or transmembrane domain-inactivated. Processes for producing the same are also herein described, wherein those processes comprise culturing a host cell comprising a vector which comprises the appropriate encoding nucleic acid molecule under conditions suitable for expression of the PRO polypeptide and recovering the PRO polypeptide from the cell culture.

[0064] In yet another embodiment, the invention concerns agonists and antagonists of a native PRO polypeptide as defined herein. In a particular embodiment, the agonist or antagonist is an anti-PRO antibody or a small molecule.

[0065] In a further embodiment, the invention concerns a method of identifying agonists or antagonists to a PRO polypeptide which comprise contacting the PRO polypeptide with a candidate molecule and monitoring a biological activity mediated by said PRO polypeptide. Preferably, the PRO polypeptide is a native PRO polypeptide.

[0066] In a still further embodiment, the invention concerns a composition of matter comprising a PRO polypeptide, or an agonist or antagonist of a PRO polypeptide as herein described, or an anti-PRO antibody, in combination with a carrier. Optionally, the carrier is a pharmaceutically acceptable carrier.

[0067] Another embodiment of the present invention is directed to the use of a PRO polypeptide, or an agonist or antagonist thereof as herein before described, or an anti-PRO antibody, for the preparation of a medicament useful in the treatment of a condition which is responsive to the PRO polypeptide, an agonist or antagonist thereof or an anti-PRO antibody.

### BRIEF DESCRIPTION OF THE DRAWINGS

[0068] The SEQ ID NOs that show the nucleic acids of the invention and their encoded PRO polypeptides involved in Rheumatoid Arthritis are:

9, 13, 17, 58, 64, 78, 82, 90, 97, 99, 103, 105, 113, 115, 131, 133, 135, 137, 139, 142, 154, 156, 158, 160, 162, 164, 166, 168, 176, 178, 182, 184, 192, 200, 206, 208, 210, 214, 218, 222, 232, 236, 238, 244, 248, 250, 256, 260, 266, 270, 272, 278, 284, 292, 325, 329, 331, 335, 337, 339, 343, 357, 365, 369, 371, 373, 375, 377, 383, 400, 414, 416, 417, 420, 422, 430, 435, 437, 441, 443, 445, 460, 470, 472, 482, 502, 509, 511, 515, 517, 525, 527, 540, 542, 546, 551, 576, 584, 591, 597, 599, 609, 613, 623, 625, 627, 629, 631, 635, 640, 654, 661, 671, 675, 677, 679, 685, 686, 699, 701, 703, 710, 715, 721, 724, 726, 730, 734, 735, 738, 740, 741, 743, 744, 752, 754, 758, 769, 771, 776, 782, 786, 794, 796, 799, 809, 813, 821, 830, 837, 845, 857, 859, 866, 867, 870, 875, 884, 890, 900, 906, 908, 912, 928, 931, 938, 941, 949, 955, 961, 964, 965, 967, 974, 982, 983, 986, 989, 990, 1007, 1014, 1016, 1017, 1029, 1038, 1048, 1050, 1052, 1056 and 1059.

[0069] The SEQ ID NOs that show the nucleic acids of the invention and their encoded PRO polypeptides involved in psoriasis are:

3, 5, 9, 11, 17, 19, 23, 25, 28, 30, 32, 34, 36, 38, 42, 44, 48, 50, 52, 54, 56, 60, 66, 67, 71, 74, 84, 96, 105, 107, 111, 115, 121, 123, 146, 148, 154, 174, 186, 190, 192, 198, 212, 224, 226, 232, 240, 264, 270, 274, 278, 286, 294, 298, 302, 304, 308, 312, 315, 323, 325, 341, 347, 353, 367, 375, 379, 383, 386, 388, 396, 400, 404, 412, 425, 430, 432, 434, 445, 448, 450, 455, 456, 464, 466, 468, 490, 500, 502, 520, 531, 538, 544, 549, 553, 555, 557, 559, 561, 563, 564, 574, 578, 582, 584, 586, 589, 593, 601, 605, 607, 609, 613, 615, 617, 619, 633, 635, 637, 638, 644, 650, 652, 654, 658, 661, 663, 665, 673, 679, 681, 683, 688, 695, 703, 707, 712, 715, 717, 719, 721, 723, 724, 728, 731, 733, 734, 743, 746, 748, 764, 776, 778, 784, 786, 792, 797, 803, 804, 807, 821, 822, 829, 832, 834, 835, 840, 858, 861, 863, 865, 869, 872, 876, 892, 893, 895, 906, 910, 919, 926, 930, 933, 936, 942, 944, 946, 948, 950, 951, 952, 955, 956, 961, 973, 976, 980, 982, 988, 996, 998, 1002, 1008, 1010, 1019, 1021, 1023, 1025, 1027, 1032, 1034, 1036, 1042, 1046, 1054, 1055 and 1058.

[0070] The SEQ ID NOs that show the nucleic acids of the invention and their encoded PRO polypeptides involved in Systemic Lupus Erythematosus are:

1, 3, 5, 7, 9, 11, 13, 15, 19, 21, 25, 26, 28, 30, 36, 38, 40, 42, 44, 46, 48, 54, 56, 58, 62, 64, 66, 69, 72, 74, 76, 80, 84, 86, 88, 90, 92, 94, 97, 99, 101, 103, 105, 109, 111, 115, 117, 119, 121, 125, 127, 129, 133, 135, 137, 141, 146, 148, 150, 152, 158, 160, 162, 168, 170, 172, 176, 180, 184, 186, 188, 190, 192, 194, 196, 200, 202, 204, 206, 208, 210, 212, 214, 216, 220, 222, 226, 228, 230, 232, 234, 236, 242, 246, 248, 250, 252, 254, 256, 258, 262, 264, 268, 270, 274, 276, 278, 280, 282, 288, 290, 296, 298, 300, 304, 306, 308, 310, 312, 314, 315, 317, 319, 321, 325, 327, 329, 331, 333, 335, 343, 345, 349, 351, 355, 359, 361, 363, 365, 367, 369, 373, 381, 383, 385, 386, 388, 390, 392, 394, 398, 400, 402, 404, 406, 408, 409, 411, 412, 414, 416, 417, 418, 420, 423, 425, 427, 429, 430, 435, 439, 441, 443, 445, 447, 450, 451, 453, 456, 458, 460, 462, 464, 466, 470, 472, 474, 476, 478, 480, 482, 484, 486, 488, 490, 492, 494, 496, 498, 500, 504, 506, 507, 509, 513, 515, 517, 518, 522, 523, 525, 529, 531, 533, 535, 536, 538, 540, 544, 548, 551, 553, 555, 559, 564, 566, 568, 570, 572, 574, 576, 578, 580, 582, 586, 588, 595, 597, 601, 603, 607, 609, 611, 613, 619, 621, 623, 625, 631, 633, 635, 638, 642, 646, 648, 652, 654, 656, 660, 663, 665, 667, 669, 671, 673, 677, 679, 681, 683, 685, 686, 690, 692, 694, 695, 697, 699, 701, 703, 705, 707, 708, 710, 714, 715, 717, 719, 721, 724, 728, 730, 731, 734, 735, 737, 738, 740, 743, 746, 748, 750, 752, 754, 756, 758, 759, 760, 762, 764, 765, 767, 769, 771, 773, 775, 778, 780, 782, 784, 786, 788, 790, 792, 794, 796, 797, 799, 801, 802, 803, 806, 807, 809, 811, 813, 815, 817, 819, 821, 822, 824, 825, 827, 829, 834, 837, 838, 842, 844, 845, 847, 849, 850, 851, 853, 855, 857, 859, 863, 865, 866, 867, 869, 870, 874, 875, 878, 880, 882, 886, 888, 890, 892, 893, 897, 898, 900, 902, 903, 906, 908, 910, 912, 914, 916, 917, 919, 921, 923, 924, 925, 926, 931, 933, 935, 940, 941, 944, 950, 952, 953, 958, 960, 961, 962, 964, 965, 969, 971, 973, 976, 978, 983, 985, 986, 988, 989, 990, 992, 994, 999, 1001, 1004, 1005, 1012, 1014, 1016, 1019, 1021, 1022, 1023, 1025, 1029, 1030, 1032, 1033, 1034, 1036, 1038, 1040, 1042, 1044, 1045, 1046, 1049, 1050, 1051, 1054, 1055, 1057 and 1058.

[0071] The SEQ ID NOs that show the nucleic acids of the invention and their encoded PRO polypeptides involved in Ulcerative Colitis are:

11, 21, 26, 30, 36, 44, 52, 78, 82, 86, 90, 119, 133, 139, 144, 162, 168, 170, 178, 184, 218, 270, 276, 315, 317, 329, 335, 337, 363, 375, 379, 383, 388, 404, 416, 420, 422, 429, 430, 432, 445, 447, 448, 468, 470, 525, 536, 538, 551, 553, 555, 564, 568, 574, 576, 597, 599, 609, 615, 625, 635, 640, 642, 650, 656, 667, 685, 690, 699, 715, 721, 735, 741, 743, 744, 756, 776, 788, 794, 802, 807, 832, 845, 863, 867, 870, 884, 904, 907, 917, 919, 928, 949, 973, 974, 989, 1017, 1038, 1050 and 1059.

[0072] The SEQ ID NOs that show the nucleic acids of the invention and their encoded PRO polypeptides involved in CD4+ T cell activation are:

3, 11, 19, 25, 26, 30, 50, 58, 60, 66, 67, 94, 101, 103, 117, 125, 131, 142, 164, 166, 188, 192, 200, 204, 216, 220, 270, 292, 312, 321, 327, 341, 345, 351, 357, 379, 385, 392, 396, 398, 416, 430, 432, 435, 447, 468, 472, 484, 513, 517, 522, 523, 533, 536, 546, 578, 588, 627, 665, 679, 683, 685, 686, 701, 712, 714, 717, 738, 741, 754, 784, 796, 824, 838, 851, 867, 926, 950, 969, 989, 999, 1012, 1038, 1046, 1056, 1060, 1062, 1064, 1070, 1098, 1110, 1124, 1133, 1137, 1143, 1184, 1200, 1220, 1266 and 1268.

[0073] The SEQ ID NOs that show the nucleic acids of the invention and their encoded PRO polypeptides involved in dendritic cell activation are:

The SEQ ID NOs that are involved in dendritic cell activation are as:
3, 5, 7, 9, 17, 19, 21, 25, 38, 40, 48, 50, 58, 60, 62, 64, 66, 74, 78, 80, 82, 84, 86, 92, 94, 96, 99, 105, 109, 111, 113, 123, 125, 131, 133, 135, 137, 148, 150, 154, 156, 160, 166, 170, 172, 174, 176, 180, 182, 186, 188, 196, 198, 202, 204, 206, 208, 212, 222, 224, 226, 228, 234, 238, 244, 250, 252, 260, 264, 266, 270, 272, 274, 276, 278, 280, 286, 288, 292, 298, 302, 308, 310, 314, 317, 321, 323, 325, 337, 339, 343, 347, 359, 365, 371, 375, 377, 379, 385, 386, 388, 390, 392, 396, 398, 404, 406, 408, 409, 414, 418, 422, 425, 427, 435, 437, 441, 445, 451, 453, 456, 464, 466, 472, 474, 478, 486, 494, 506, 509, 515, 518, 522, 525, 527, 538, 540, 548, 549, 553, 555, 557, 559, 563, 564, 568, 570, 572, 574, 576, 580, 582, 586, 589, 591, 597, 601, 603, 607, 615, 621, 625, 627, 629, 631, 644, 652, 654, 658, 663, 667, 671, 673, 675, 681, 683, 686, 694, 697, 703, 708, 710, 712, 714, 715, 719, 721, 724, 728, 730, 731, 733, 734, 737, 740, 741, 743, 744, 746, 752, 754, 756, 759, 765, 767, 773, 775, 776, 780, 788, 790, 792, 794, 797, 799, 803, 804, 806, 807, 811, 819, 821, 822, 825, 827, 829, 830, 832, 835, 851, 853, 857, 865, 866, 867, 872, 888, 892, 893, 897, 898, 900, 902, 903, 906, 916, 917, 925, 928, 931, 936, 938, 941, 952, 955, 961, 964, 965, 969, 971, 978, 996, 1001, 1002, 1008, 1010, 1014, 1019, 1036, 1038, 1040, 1044, 1045, 1046, 1048, 1049, 1050, 1057, 1058, 1059, 1064, 1070, 1072, 1078, 1080, 1082, 1084, 1090, 1092, 1100, 1102, 1104, 1108, 1112, 1120, 1124, 1126, 1128, 1131, 1144, 1146, 1154, 1160, 1162, 1164, 1166, 1170, 1171, 1175, 1179, 1184, 1186, 1188, 1191, 1193, 1198, 1205, 1207, 1210, 1214, 1217, 1218, 1221, 1222, 1225, 1227, 1232, 1234, 1238, 1240, 1242, 1246, 1250, 1251, 1257, 1265, 1271 and 1274.

[0074] The SEQ ID NOs that show the nucleic acids of the invention and their encoded PRO polypeptides involved in B cell activation are:

9, 28, 48, 50, 56, 58, 74, 82, 101, 117, 131, 135, 160, 170, 176, 178, 204, 208, 228, 246, 270, 278, 321, 323, 331, 365, 383, 386, 392, 400, 435, 458, 484, 492, 498, 515, 525, 549, 591, 597, 652, 661, 663, 669, 677, 686, 714, 715, 728, 750, 771, 780, 782, 794, 796, 834, 845, 866, 900, 919, 941, 1016, 1021, 1032, 1051, 1052, 1058, 1098, 1131, 1150, 1173, 1208, 1255, 1257, 1265, 1267 and 1271.

[0075] The SEQ ID NOs that show the nucleic acids of the invention and their encoded PRO polypeptides involved in Memory T Cell activation are:

1, 3, 7, 9, 26, 44, 52, 54, 58, 60, 67, 71, 78, 82, 99, 101, 109, 123, 125, 129, 131, 135, 142, 148, 150, 156, 158, 162, 168, 176, 188, 192, 200, 204, 208, 216, 248, 256, 268, 304, 308, 323, 325, 327, 329, 341, 359, 369, 375, 379, 385, 390, 392, 396, 404, 412, 416, 420, 422, 425, 427, 432, 435, 443, 464, 466, 468, 472, 478, 484, 490, 522, 525, 531, 536, 540, 553, 555, 559, 563, 564, 586, 588, 593, 605, 607, 613, 615, 627, 635, 638, 652, 654, 658, 660, 661, 667, 671, 677, 679, 683, 688, 690, 692, 695, 699, 707, 708, 710, 714, 717, 726, 735, 737, 738, 743, 752, 760, 762, 778, 784, 790, 792, 796, 797, 801, 802, 807, 822, 829, 837, 842, 844, 851, 857, 863, 874, 876, 884, 888, 895, 897, 902, 906, 908, 912, 914, 919, 926, 944, 960, 964, 969, 973, 976, 978, 980, 989, 990, 999, 1002, 1004, 1005, 1012, 1014, 1025, 1029, 1032, 1033, 1034, 1045, 1057, 1059, 1060, 1062, 1064, 1072, 1080, 1090, 1096, 1098, 1110, 1124, 1133, 1135, 1137, 1156, 1166, 1175, 1178, 1179, 1182, 1191, 1195, 1202, 1207, 1208, 1218, 1220, 1232, 1238, 1251 and 1267.

[0076] The SEQ ID NOs that show the nucleic acids of the invention and their encoded PRO polypeptides involved in monocyte activation are:

3, 5, 7, 9, 13, 23, 26, 28, 30, 32, 34, 40, 42, 44, 46, 48, 50, 52, 54, 56, 58, 60, 64, 66, 67, 69, 71, 72, 74, 76, 78, 80, 82, 84, 86, 88, 90, 92, 94, 96, 97, 99, 101, 103, 107, 109, 111, 113, 115, 117, 119, 121, 123, 125, 127, 131, 133, 135, 137, 139, 141, 142, 144, 146, 148, 150, 152, 154, 156, 160, 162, 164, 166, 170, 172, 174, 176, 182, 184, 186, 192, 196, 198, 202, 204, 208, 212, 214, 216, 218, 220, 222, 224, 228, 230, 232, 238, 240, 242, 244, 250, 252, 258, 260, 264, 266, 270, 272, 280, 284, 286, 288, 292, 294, 296, 298, 302, 306, 308, 314, 315, 317, 321, 325, 329, 335, 337, 341, 343, 349, 351, 353, 355, 357, 359, 361, 363, 365, 369, 375, 377, 379, 381, 385, 386, 388, 390, 392, 394, 398, 400, 402, 404, 409, 411, 412, 414, 417, 418, 422, 423, 425, 432, 437, 439, 441, 448, 451, 456, 458, 464, 466, 468, 470, 472, 474, 480, 482, 484, 486, 490, 492, 496, 504, 507, 509, 511, 513, 515, 517, 520, 522, 531, 533, 535, 536, 538, 546, 549, 551, 553, 555, 557, 559, 564, 566, 570, 578, 580, 582, 584, 586, 589, 593, 595, 599, 601, 603, 607, 615, 617, 621, 625, 629, 633, 635, 640, 644, 646, 652, 654, 660, 661, 663, 665, 669, 673, 675, 677, 683, 685, 686, 688, 690, 692, 694, 697, 699, 701, 707, 708, 710, 712, 714, 719, 721, 726, 728, 730, 733, 735, 737, 738, 743, 744, 752, 754, 756, 759, 760, 762, 764, 767, 773, 775, 776, 778, 780, 782, 784, 786, 790, 792, 794, 796, 803, 804, 806, 807, 813, 815, 817, 822, 827, 830, 832, 834, 837, 838, 842, 845, 847, 849, 850, 853, 855, 859, 861, 863, 865, 866, 867, 870, 872, 874, 878, 880, 882, 884, 886, 888, 890, 895, 897, 900, 903, 904, 906, 907, 910, 916, 917, 919, 923, 925, 926, 930, 935, 936, 938, 940, 948, 951, 952, 960, 962, 965, 967, 969, 971, 973, 974, 980, 982, 985, 989, 990, 999, 1001, 1002, 1007, 1008, 1010, 1012, 1014, 1017, 1019, 1023, 1025, 1030, 1032, 1033, 1034, 1038, 1040, 1046, 1050, 1051, 1054, 1056, 1057, 1059, 1060, 1062, 1064, 1066, 1068, 1070, 1072, 1074, 1076, 1078, 1080, 1082, 1084, 1086, 1090, 1092, 1094, 1098, 1104, 1106, 1114, 1116, 1118, 1120, 1122, 1124, 1126, 1128, 1133, 1135, 1137, 1141, 1144, 1148, 1150, 1152, 1154, 1156, 1164, 1166, 1168, 1170, 1171, 1173, 1175, 1177, 1178, 1179, 1181, 1182, 1184, 1186, 1188, 1190, 1191, 1193, 1196, 1198, 1205, 1207, 1208, 1209, 1210, 1212, 1214, 1216, 1220, 1221, 1222, 1225, 1229, 1230, 1234, 1236, 1244, 1245, 1246, 1248, 1253, 1255, 1257, 1258, 1260, 1261, 1263, 1265 and 1271.

[0077] The SEQ ID NOs that show the nucleic acids of the invention and their encoded PRO polypeptides involved in NK cell activation are:

5, 28, 30, 44, 48, 58, 97, 142, 164, 188, 254, 292, 296, 308, 327, 379, 417, 443, 462, 468, 472, 484, 522, 523, 555, 559, 588, 627, 638, 737, 738, 740, 780, 807, 840, 850, 990, 1005, 1034, 1064, 1098, 1124, 1196 and 1234.

[0078] The SEQ ID NOs that show the nucleic acids of the invention and their encoded PRO polypeptides involved in Cytotoxic T-cell activation are:

1, 3, 7, 19, 25, 26, 36, 42, 44, 48, 50, 58, 66, 78, 82, 86, 99, 101, 103, 109, 123, 125, 131, 135, 142, 158, 162, 164, 168, 180, 188, 192, 200, 204, 210, 216, 242, 248, 256, 264, 268, 282, 292, 302, 306, 310, 321, 325, 327, 329, 341, 359, 375, 379, 385, 392, 396, 398, 404, 412, 416, 420, 422, 425, 427, 429, 432, 434, 441, 443, 445, 447, 455, 458, 464, 468, 472, 474, 484, 486, 490, 513, 522, 523, 525, 536, 540, 555, 557, 559, 563, 586, 588, 595, 609, 613, 615, 623, 640, 648, 652, 658, 661, 667, 675, 679, 683, 686, 688, 690, 692, 695, 699, 707, 710, 712, 714, 717, 735, 738, 743, 754, 765, 778, 784, 786, 788, 790, 792, 796, 807, 821, 822, 824, 838, 842, 851, 863, 874, 875, 884, 886, 888, 902, 904, 906, 908, 912, 926, 928, 969, 976, 980, 985, 989, 990, 996, 999, 1005, 1012, 1014, 1021, 1029, 1032, 1034, 1036, 1038, 1042, 1054, 1056, 1059, 1060, 1062, 1064, 1070, 1072, 1080, 1090, 1098, 1114, 1124, 1129, 1131, 1133, 1135, 1137, 1143, 1156, 1164, 1166, 1175, 1179, 1195, 1200, 1207, 1208, 1218, 1232, 1238, 1253, 1265, 1268 and 1269.

### DETAILED DESCRIPTION OF THE PREFERRED EMBODIMENTS

### I. Definitions

[0079] The terms “PRO polypeptide” and “PRO” as used herein and when immediately followed by a numerical designation refer to various polypeptides, wherein the complete designation (i.e., PRO/number) refers to specific polypeptide sequences as described herein. The terms “PRO/number polypeptide” and “PRO/number” wherein the term “number” is provided as an actual numerical designation as used herein encompass native sequence polypeptides and polypeptide variants (which are further defined herein). The PRO polypeptides described herein may be isolated from a variety of sources, such as from human tissue types or from another source, or prepared by recombinant or synthetic methods. The term “PRO polypeptide” refers to each individual PRO/number polypeptide disclosed herein. All disclosures in this specification which refer to the “PRO polypeptide” refer to each of the polypeptides individually as well as jointly. For example, descriptions of the preparation of, purification of, derivation of, formation of antibodies to or against, administration of, compositions containing, treatment of a disease with, etc., pertain to each polypeptide of the invention individually. The term “PRO polypeptide” also includes variants of the PRO/number polypeptides disclosed herein.

[0080] A “native sequence PRO polypeptide” comprises a polypeptide having the same amino acid sequence as the corresponding PRO polypeptide derived from nature. Such native sequence PRO polypeptides can be isolated from nature or can be produced by recombinant or synthetic means. The term “native sequence PRO polypeptide” specifically encompasses naturally-occurring truncated or secreted forms of the specific PRO polypeptide (e.g. an extracellular domain sequence), naturally-occurring variant forms (e.g., alternatively spliced forms) and naturally-occurring allelic variants of the polypeptide. In various embodiments of the invention, the native sequence PRO polypeptides disclosed herein are mature or full-length native sequence polypeptides comprising the full-length amino acids sequences shown in the accompanying figures. Start and stop codons are shown in bold font and underlined in the figures. However, while the PRO polypeptide disclosed in the accompanying figures are shown to begin with methionine residues designated herein as amino acid position 1 in the figures, it is conceivable and possible that other methionine residues located either upstream or downstream from the amino acid position 1 in the figures may be employed as the starting amino acid residue for the PRO polypeptides.

[0081] The PRO polypeptide “extracellular domain” or “ECD” refers to a form of the PRO polypeptide which is essentially free of the transmembrane and cytoplasmic domains. Ordinarily, a PRO polypeptide ECD will have less than 1% of such transmembrane and/or cytoplasmic domains and preferably, will have less than 0.5% of such domains. It will be understood that any transmembrane domains identified for the PRO polypeptides of the present invention are identified pursuant to criteria routinely employed in the art for identifying that type of hydrophobic domain. The exact boundaries of a transmembrane domain may vary but most likely by no more than about 5 amino acids at either end of the domain as initially identified herein. Optionally, therefore, an extracellular domain of a PRO polypeptide may contain from about 5 or fewer amino acids on either side of the transmembrane domain/extracellular domain boundary as identified in the Examples or specification and such polypeptides, with or without the associated signal peptide, and nucleic acid encoding them, are contemplated by the present invention.

[0082] The approximate location of the “signal peptides” of the various PRO polypeptides disclosed herein are shown in the present specification and/or the accompanying figures. It is noted, however, that the C-terminal boundary of a signal peptide may vary, but most likely by no more than about 5 amino acids on either side of the signal peptide C-terminal boundary as initially identified herein, wherein the C-terminal boundary of the signal peptide may be identified pursuant to criteria routinely employed in the art for identifying that type of amino acid sequence element (e.g., Nielsen et al., Prot. Eng. 10:1-6 (1997) and von Heinje et al., Nucl. Acids. Res. 14:4683-4690 (1986)). Moreover, it is also recognized that, in some cases, cleavage of a signal sequence from a secreted polypeptide is not entirely uniform, resulting in more than one secreted species. These mature polypeptides, where the signal peptide is cleaved within no more than about 5 amino acids on either side of the C-terminal boundary of the signal peptide as identified herein, and the polynucleotides encoding them, are contemplated by the present invention.

[0083] “PRO polypeptide variant” means an active PRO polypeptide as defined above or below having at least about 80% amino acid sequence identity with a full-length native sequence PRO polypeptide sequence as disclosed herein, a PRO polypeptide sequence lacking the signal peptide as disclosed herein, an extracellular domain of a PRO polypeptide, with or without the signal peptide, as disclosed herein or any other fragment of a full-length PRO polypeptide sequence as disclosed herein. Such PRO polypeptide variants include, for instance, PRO polypeptides wherein one or more amino acid residues are added, or deleted, at the N- or C-terminus of the full-length native amino acid sequence. Ordinarily, a PRO polypeptide variant will have at least about 80% amino acid sequence identity, alternatively at least about 81% amino acid sequence identity, alternatively at least about 82% amino acid sequence identity, alternatively at least about 83% amino acid sequence identity, alternatively at least about 84% amino acid sequence identity, alternatively at least about 85% amino acid sequence identity, alternatively at least about 86% amino acid sequence identity, alternatively at least about 87% amino acid sequence identity, alternatively at least about 88% amino acid sequence identity, alternatively at least about 89% amino acid sequence identity, alternatively at least about 90% amino acid sequence identity, alternatively at least about 91% amino acid sequence identity, alternatively at least about 92% amino acid sequence identity, alternatively at least about 93% amino acid sequence identity, alternatively at least about 94% amino acid sequence identity, alternatively at least about 95% amino acid sequence identity, alternatively at least about 96% amino acid sequence identity, alternatively at least about 97% amino acid sequence identity, alternatively at least about 98% amino acid sequence identity and alternatively at least about 99% amino acid sequence identity to a full-length native sequence PRO polypeptide sequence as disclosed herein, a PRO polypeptide sequence lacking the signal peptide as disclosed herein, an extracellular domain of a PRO polypeptide, with or without the signal peptide, as disclosed herein or any other specifically defined fragment of a full-length PRO polypeptide sequence as disclosed herein. Ordinarily, PRO variant polypeptides are at least about 10 amino acids in length, alternatively at least about 20 amino acids in length, alternatively at least about 30 amino acids in length, alternatively at least about 40 amino acids in length, alternatively at least about 50 amino acids in length, alternatively at least about 60 amino acids in length, alternatively at least about 70 amino acids in length, alternatively at least about 80 amino acids in length, alternatively at least about 90 amino acids in length, alternatively at least about 100 amino acids in length, alternatively at least about 150 amino acids in length, alternatively at least about 200 amino acids in length, alternatively at least about 300 amino acids in length, or more.

[0084] “Percent (%) amino acid sequence identity” with respect to the PRO polypeptide sequences identified herein is defined as the percentage of amino acid residues in a candidate sequence that are identical with the amino acid residues in the specific PRO polypeptide sequence, after aligning the sequences and introducing gaps, if necessary, to achieve the maximum percent sequence identity, and not considering any conservative substitutions as part of the sequence identity. Alignment for purposes of determining percent amino acid sequence identity can be achieved in various ways that are within the skill in the art, for instance, using publicly available computer software such as BLAST, BLAST-2, ALIGN or Megalign (DNASTAR) software. Those skilled in the art can determine appropriate parameters for measuring alignment, including any algorithms needed to achieve maximal alignment over the full length of the sequences being compared. For purposes herein, however, % amino acid sequence identity values are generated using the sequence comparison computer program ALIGN-2, wherein the complete source code for the ALIGN-2 program is provided in Table 1 below. The ALIGN-2 sequence comparison computer program was authored by Genentech, Inc. and the source code shown in Table 1 below has been filed with user documentation in the U.S. Copyright Office, Washington D.C., 20559, where it is registered under U.S. Copyright Registration No. TXU510087. The ALIGN-2 program is publicly available through Genentech, Inc., South San Francisco, Calif. or may be compiled from the source code provided in Table 1 below. The ALIGN-2 program should be compiled for use on a UNIX operating system, preferably digital UNIX V4.0D. All sequence comparison parameters are set by the ALIGN-2 program and do not vary.

[0085] In situations where ALIGN-2 is employed for amino acid sequence comparisons, the % amino acid sequence identity of a given amino acid sequence A to, with, or against a given amino acid sequence B (which can alternatively be phrased as a given amino acid sequence A that has or comprises a certain % amino acid sequence identity to, with, or against a given amino acid sequence B) is calculated as follows:

100 times the fraction X/Y

where X is the number of amino acid residues scored as identical matches by the sequence alignment program ALIGN-2 in that program's alignment of A and B, and where Y is the total number of amino acid residues in B. It will be appreciated that where the length of amino acid sequence A is not equal to the length of amino acid sequence B, the % amino acid sequence identity of A to B will not equal the % amino acid sequence identity of B to A. As examples of % amino acid sequence identity calculations using this method, Tables 2 and 3 demonstrate how to calculate the % amino acid sequence identity of the amino acid sequence designated “Comparison Protein” to the amino acid sequence designated “PRO”, wherein “PRO” represents the amino acid sequence of a hypothetical PRO polypeptide of interest, “Comparison Protein” represents the amino acid sequence of a polypeptide against which the “PRO” polypeptide of interest is being compared, and “X, “Y” and “Z” each represent different hypothetical amino acid residues.

[0086] Unless specifically stated otherwise, all % amino acid sequence identity values used herein are obtained as described in the immediately preceding paragraph using the ALIGN-2 computer program. However, % amino acid sequence identity values may also be obtained as described below by using the WU-BLAST-2 computer program (Altschul et al., Methods in Enzymology 266:460-480 (1996)). Most of the WU-BLAST-2 search parameters are set to the default values. Those not set to default values, i.e., the adjustable parameters, are set with the following values: overlap span=1, overlap fraction=0.125, word threshold (T)=11, and scoring matrix=BLOSUM62. When WU-BLAST-2 is employed, a % amino acid sequence identity value is determined by dividing (a) the number of matching identical amino acid residues between the amino acid sequence of the PRO polypeptide of interest having a sequence derived from the native PRO polypeptide and the comparison amino acid sequence of interest (i.e., the sequence against which the PRO polypeptide of interest is being compared which may be a PRO variant polypeptide) as determined by WU-BLAST-2 by (b) the total number of amino acid residues of the PRO polypeptide of interest. For example, in the statement “a polypeptide comprising an the amino acid sequence A which has or having at least 80% amino acid sequence identity to the amino acid sequence B”, the amino acid sequence A is the comparison amino acid sequence of interest and the amino acid sequence B is the amino acid sequence of the PRO polypeptide of interest.

[0087] Percent amino acid sequence identity may also be determined using the sequence comparison program NCBI-BLAST2 (Altschul et al., Nucleic Acids Res. 25:3389-3402 (1997)). The NCBI-BLAST2 sequence comparison program may be downloaded from http://www.ncbi.nlm.nih.gov or otherwise obtained from the National Institute of Health, Bethesda, Md. NCBI-BLAST2 uses several search parameters, wherein all of those search parameters are set to default values including, for example, unmask=yes, strand=all, expected occurrences=10, minimum low complexity length=15/5, multi-pass e-value=0.01, constant for multi-pass=25, dropoff for final gapped alignment=25 and scoring matrix=BLOSUM62.

[0088] In situations where NCBI-BLAST2 is employed for amino acid sequence comparisons, the % amino acid sequence identity of a given amino acid sequence A to, with, or against a given amino acid sequence B (which can alternatively be phrased as a given amino acid sequence A that has or comprises a certain % amino acid sequence identity to, with, or against a given amino acid sequence B) is calculated as follows:

100 times the fraction X/Y

where X is the number of amino acid residues scored as identical matches by the sequence alignment program NCBI-BLAST2 in that program's alignment of A and B, and where Y is the total number of amino acid residues in B. It will be appreciated that where the length of amino acid sequence A is not equal to the length of amino acid sequence B, the % amino acid sequence identity of A to B will not equal the % amino acid sequence identity of B to A.

[0089] “PRO variant polynucleotide” or “PRO variant nucleic acid sequence” means a nucleic acid molecule which encodes an active PRO polypeptide as defined below and which has at least about 80% nucleic acid sequence identity with a nucleotide acid sequence encoding a full-length native sequence PRO polypeptide sequence as disclosed herein, a full-length native sequence PRO polypeptide sequence lacking the signal peptide as disclosed herein, an extracellular domain of a PRO polypeptide, with or without the signal peptide, as disclosed herein or any other fragment of a full-length PRO polypeptide sequence as disclosed herein. Ordinarily, a PRO variant polynucleotide will have at least about 80% nucleic acid sequence identity, alternatively at least about 81% nucleic acid sequence identity, alternatively at least about 82% nucleic acid sequence identity, alternatively at least about 83% nucleic acid sequence identity, alternatively at least about 84% nucleic acid sequence identity, alternatively at least about 85% nucleic acid sequence identity, alternatively at least about 86% nucleic acid sequence identity, alternatively at least about 87% nucleic acid sequence identity, alternatively at least about 88% nucleic acid sequence identity, alternatively at least about 89% nucleic acid sequence identity, alternatively at least about 90% nucleic acid sequence identity, alternatively at least about 91% nucleic acid sequence identity, alternatively at least about 92% nucleic acid sequence identity, alternatively at least about 93% nucleic acid sequence identity, alternatively at least about 94% nucleic acid sequence identity, alternatively at least about 95% nucleic acid sequence identity, alternatively at least about 96% nucleic acid sequence identity, alternatively at least about 97% nucleic acid sequence identity, alternatively at least about 98% nucleic acid sequence identity and alternatively at least about 99% nucleic acid sequence identity with a nucleic acid sequence encoding a full-length native sequence PRO polypeptide sequence as disclosed herein, a full-length native sequence PRO polypeptide sequence lacking the signal peptide as disclosed herein, an extracellular domain of a PRO polypeptide, with or without the signal sequence, as disclosed herein or any other fragment of a full-length PRO polypeptide sequence as disclosed herein. Variants do not encompass the native nucleotide sequence.

[0090] Ordinarily, PRO variant polynucleotides are at least about 30 nucleotides in length, alternatively at least about 60 nucleotides in length, alternatively at least about 90 nucleotides in length, alternatively at least about 120 nucleotides in length, alternatively at least about 150 nucleotides in length, alternatively at least about 180 nucleotides in length, alternatively at least about 210 nucleotides in length, alternatively at least about 240 nucleotides in length, alternatively at least about 270 nucleotides in length, alternatively at least about 300 nucleotides in length, alternatively at least about 450 nucleotides in length, alternatively at least about 600 nucleotides in length, alternatively at least about 900 nucleotides in length, or more.

[0091] “Percent (%) nucleic acid sequence identity” with respect to PRO-encoding nucleic acid sequences identified herein is defined as the percentage of nucleotides in a candidate sequence that are identical with the nucleotides in the PRO nucleic acid sequence of interest, after aligning the sequences and introducing gaps, if necessary, to achieve the maximum percent sequence identity. Alignment for purposes of determining percent nucleic acid sequence identity can be achieved in various ways that are within the skill in the art, for instance, using publicly available computer software such as BLAST, BLAST-2, ALIGN or Megalign (DNASTAR) software. For purposes herein, however, % nucleic acid sequence identity values are generated using the sequence comparison computer program ALIGN-2, wherein the complete source code for the ALIGN-2 program is provided in Table 1 below. The ALIGN-2 sequence comparison computer program was authored by Genentech, Inc. and the source code shown in Table 1 below has been filed with user documentation in the U.S. Copyright Office, Washington D.C., 20559, where it is registered under U.S. Copyright Registration No. TXU510087. The ALIGN-2 program is publicly available through Genentech, Inc., South San Francisco, Calif. or may be compiled from the source code provided in Table 1 below. The ALIGN-2 program should be compiled for use on a UNIX operating system, preferably digital UNIX V4.0D. All sequence comparison parameters are set by the ALIGN-2 program and do not vary.

[0092] In situations where ALIGN-2 is employed for nucleic acid sequence comparisons, the % nucleic acid sequence identity of a given nucleic acid sequence C to, with, or against a given nucleic acid sequence D (which can alternatively be phrased as a given nucleic acid sequence C that has or comprises a certain % nucleic acid sequence identity to, with, or against a given nucleic acid sequence D) is calculated as follows:

100 times the fraction W/Z

where W is the number of nucleotides scored as identical matches by the sequence alignment program ALIGN-2 in that program's alignment of C and D, and where Z is the total number of nucleotides in D. It will be appreciated that where the length of nucleic acid sequence C is not equal to the length of nucleic acid sequence D, the % nucleic acid sequence identity of C to D will not equal the % nucleic acid sequence identity of D to C. As examples of % nucleic acid sequence identity calculations, Tables 4 and 5, demonstrate how to calculate the % nucleic acid sequence identity of the nucleic acid sequence designated “Comparison DNA” to the nucleic acid sequence designated “PRO-DNA”, wherein “PRO-DNA” represents a hypothetical PRO-encoding nucleic acid sequence of interest, “Comparison DNA” represents the nucleotide sequence of a nucleic acid molecule against which the “PRO-DNA” nucleic acid molecule of interest is being compared, and “N”, “L” and “V” each represent different hypothetical nucleotides.

[0093] Unless specifically stated otherwise, all % nucleic acid sequence identity values used herein are obtained as described in the immediately preceding paragraph using the ALIGN-2 computer program. However, % nucleic acid sequence identity values may also be obtained as described below by using the WU-BLAST-2 computer program (Altschul et al., Methods in Enzymology 266:460-480 (1996)). Most of the WU-BLAST-2 search parameters are set to the default values. Those not set to default values, i.e., the adjustable parameters, are set with the following values: overlap span=1, overlap fraction=0.125, word threshold (T)=11, and scoring matrix=BLOSUM62. When WU-BLAST-2 is employed, a % nucleic acid sequence identity value is determined by dividing (a) the number of matching identical nucleotides between the nucleic acid sequence of the PRO polypeptide-encoding nucleic acid molecule of interest having a sequence derived from the native sequence PRO polypeptide-encoding nucleic acid and the comparison nucleic acid molecule of interest (i.e., the sequence against which the PRO polypeptide-encoding nucleic acid molecule of interest is being compared which may be a variant PRO polynucleotide) as determined by WU-BLAST-2 by (b) the total number of nucleotides of the PRO polypeptide-encoding nucleic acid molecule of interest. For example, in the statement “an isolated nucleic acid molecule comprising a nucleic acid sequence A which has or having at least 80% nucleic acid sequence identity to the nucleic acid sequence B”, the nucleic acid sequence A is the comparison nucleic acid molecule of interest and the nucleic acid sequence B is the nucleic acid sequence of the PRO polypeptide-encoding nucleic acid molecule of interest.

[0094] Percent nucleic acid sequence identity may also be determined using the sequence comparison program NCBI-BLAST2 (Altschul et al., Nucleic Acids Res. 25:3389-3402 (1997)). The NCBI-BLAST2 sequence comparison program may be downloaded from http://www.ncbi.nlm.nih.gov or otherwise obtained from the National Institute of Health, Bethesda, Md. NCBI-BLAST2 uses several search parameters, wherein all of those search parameters are set to default values including, for example, unmask=yes, strand=all, expected occurrences=10, minimum low complexity length=15/5, multi-pass e-value=0.01, constant for multi-pass=25, dropoff for final gapped alignment=25 and scoring matrix=BLOSUM62.

[0095] In situations where NCBI-BLAST2 is employed for sequence comparisons, the % nucleic acid sequence identity of a given nucleic acid sequence C to, with, or against a given nucleic acid sequence D (which can alternatively be phrased as a given nucleic acid sequence C that has or comprises a certain % nucleic acid sequence identity to, with, or against a given nucleic acid sequence D) is calculated as follows:

100 times the fraction W/Z

where W is the number of nucleotides scored as identical matches by the sequence alignment program NCBI-BLAST2 in that program's alignment of C and D, and where Z is the total number of nucleotides in D. It will be appreciated that where the length of nucleic acid sequence C is not equal to the length of nucleic acid sequence D, the % nucleic acid sequence identity of C to D will not equal the % nucleic acid sequence identity of D to C.

[0096] In other embodiments, PRO variant polynucleotides are nucleic acid molecules that encode an active PRO polypeptide and which are capable of hybridizing, preferably under stringent hybridization and wash conditions, to nucleotide sequences encoding a full-length PRO polypeptide as disclosed herein. PRO variant polypeptides may be those that are encoded by a PRO variant polynucleotide.

[0097] “Isolated,” when used to describe the various polypeptides disclosed herein, means polypeptide that has been identified and separated and/or recovered from a component of its natural environment. Contaminant components of its natural environment are materials that would typically interfere with diagnostic or therapeutic uses for the polypeptide, and may include enzymes, hormones, and other proteinaceous or non-proteinaceous solutes. In preferred embodiments, the polypeptide will be purified (1) to a degree sufficient to obtain at least 15 residues of N-terminal or internal amino acid sequence by use of a spinning cup sequenator, or (2) to homogeneity by SDS-PAGE under non-reducing or reducing conditions using Coomassie blue or, preferably, silver stain. Isolated polypeptide includes polypeptide in situ within recombinant cells, since at least one component of the PRO polypeptide natural environment will not be present. Ordinarily, however, isolated polypeptide will be prepared by at least one purification step.

[0098] An “isolated” PRO polypeptide-encoding nucleic acid or other polypeptide-encoding nucleic acid is a nucleic acid molecule that is identified and separated from at least one contaminant nucleic acid molecule with which it is ordinarily associated in the natural source of the polypeptide-encoding nucleic acid. An isolated polypeptide-encoding nucleic acid molecule is other than in the form or setting in which it is found in nature. Isolated polypeptide-encoding nucleic acid molecules therefore are distinguished from the specific polypeptide-encoding nucleic acid molecule as it exists in natural cells. However, an isolated polypeptide-encoding nucleic acid molecule includes polypeptide-encoding nucleic acid molecules contained in cells that ordinarily express the polypeptide where, for example, the nucleic acid molecule is in a chromosomal location different from that of natural cells.

[0099] The term “control sequences” refers to DNA sequences necessary for the expression of an operably linked coding sequence in a particular host organism. The control sequences that are suitable for prokaryotes, for example, include a promoter, optionally an operator sequence, and a ribosome binding site. Eukaryotic cells are known to utilize promoters, polyadenylation signals, and enhancers.

[0100] Nucleic acid is “operably linked” when it is placed into a functional relationship with another nucleic acid sequence. For example, DNA for a presequence or secretory leader is operably linked to DNA for a polypeptide if it is expressed as a preprotein that participates in the secretion of the polypeptide; a promoter or enhancer is operably linked to a coding sequence if it affects the transcription of the sequence; or a ribosome binding site is operably linked to a coding sequence if it is positioned so as to facilitate translation. Generally, “operably linked” means that the DNA sequences being linked are contiguous, and, in the case of a secretory leader, contiguous and in reading phase. However, enhancers do not have to be contiguous. Linking is accomplished by ligation at convenient restriction sites. If such sites do not exist, the synthetic oligonucleotide adaptors or linkers are used in accordance with conventional practice.

[0101] The term “antibody” is used in the broadest sense and specifically covers, for example, single anti-PRO monoclonal antibodies (including agonist, antagonist, and neutralizing antibodies), anti-PRO antibody compositions with polyepitopic specificity, single chain anti-PRO antibodies, and fragments of anti-PRO antibodies (see below). The term “monoclonal antibody” as used herein refers to an antibody obtained from a population of substantially homogeneous antibodies, i.e., the individual antibodies comprising the population are identical except for possible naturally-occurring mutations that may be present in minor amounts.

[0102] “Stringency” of hybridization reactions is readily determinable by one of ordinary skill in the art, and generally is an empirical calculation dependent upon probe length, washing temperature, and salt concentration. In general, longer probes require higher temperatures for proper annealing, while shorter probes need lower temperatures. Hybridization generally depends on the ability of denatured DNA to reanneal when complementary strands are present in an environment below their melting temperature. The higher the degree of desired homology between the probe and hybridizable sequence, the higher the relative temperature which can be used. As a result, it follows that higher relative temperatures would tend to make the reaction conditions more stringent, while lower temperatures less so. For additional details and explanation of stringency of hybridization reactions, see Ausubel et al., Current Protocols in Molecular Biology, Wiley Interscience Publishers, (1995).

[0103] “Stringent conditions” or “high stringency conditions”, as defined herein, may be identified by those that: (1) employ low ionic strength and high temperature for washing, for example 0.015 M sodium chloride/0.0015 M sodium citrate/0.1% sodium dodecyl sulfate at 50° C.; (2) employ during hybridization a denaturing agent, such as formamide, for example, 50% (v/v) formamide with 0.1% bovine serum albumin/0.1% Ficoll/0.1% polyvinylpyrrolidone/50 mM sodium phosphate buffer at pH 6.5 with 750 mM sodium chloride, 75 mM sodium citrate at 42° C.; or (3) employ 50% formamide, 5×SSC (0.75 M NaCl, 0.075 M sodium citrate), 50 mM sodium phosphate (pH 6.8), 0.1% sodium pyrophosphate, 5×Denhardt's solution, sonicated salmon sperm DNA (50 μg/ml), 0.1% SDS, and 10% dextran sulfate at 42° C., with washes at 42° C. in 0.2×SSC (sodium chloride/sodium citrate) and 50% formamide at 55° C., followed by a high-stringency wash consisting of 0.1×SSC containing EDTA at 55° C.

[0104] “Moderately stringent conditions” may be identified as described by Sambrook et al., Molecular Cloning: A Laboratory Manual, New York: Cold Spring Harbor Press, 1989, and include the use of washing solution and hybridization conditions (e.g., temperature, ionic strength and % SDS) less stringent that those described above. An example of moderately stringent conditions is overnight incubation at 37° C. in a solution comprising: 20% formamide, 5×SSC (150 mM NaCl, 15 mM trisodium citrate), 50 mM sodium phosphate (pH 7.6), 5×Denhardt's solution, 10% dextran sulfate, and 20 mg/ml denatured sheared salmon sperm DNA, followed by washing the filters in 1×SSC at about 37-50° C. The skilled artisan will recognize how to adjust the temperature, ionic strength, etc. as necessary to accommodate factors such as probe length and the like.

[0105] The term “epitope tagged” when used herein refers to a chimeric polypeptide comprising a PRO polypeptide fused to a “tag polypeptide”. The tag polypeptide has enough residues to provide an epitope against which an antibody can be made, yet is short enough such that it does not interfere with activity of the polypeptide to which it is fused. The tag polypeptide preferably also is fairly unique so that the antibody does not substantially cross-react with other epitopes. Suitable tag polypeptides generally have at least six amino acid residues and usually between about 8 and 50 amino acid residues (preferably, between about 10 and 20 amino acid residues).

[0106] As used herein, the term “immunoadhesin” designates antibody-like molecules which combine the binding specificity of a heterologous protein (an “adhesin”) with the effector functions of immunoglobulin constant domains. Structurally, the immunoadhesins comprise a fusion of an amino acid sequence with the desired binding specificity which is other than the antigen recognition and binding site of an antibody (i.e., is “heterologous”), and an immunoglobulin constant domain sequence. The adhesin part of an immunoadhesin molecule typically is a contiguous amino acid sequence comprising at least the binding site of a receptor or a ligand. The immunoglobulin constant domain sequence in the immunoadhesin may be obtained from any immunoglobulin, such as IgG-1, IgG-2, IgG-3, or IgG-4 subtypes, IgA (including IgA-1 and IgA-2), IgE, IgD or IgM.

[0107] “Active” or “activity” for the purposes herein refers to form(s) of a PRO polypeptide which retain a biological and/or an immunological activity of native or naturally-occurring PRO, wherein “biological” activity refers to a biological function (either inhibitory or stimulatory) caused by a native or naturally-occurring PRO other than the ability to induce the production of an antibody against an antigenic epitope possessed by a native or naturally-occurring PRO and an “immunological” activity refers to the ability to induce the production of an antibody against an antigenic epitope possessed by a native or naturally-occurring PRO.

[0108] The term “antagonist” is used in the broadest sense, and includes any molecule that partially or fully blocks, inhibits, or neutralizes a biological activity of a native PRO polypeptide disclosed herein. In a similar manner, the term “agonist” is used in the broadest sense and includes any molecule that mimics a biological activity of a native PRO polypeptide disclosed herein. Suitable agonist or antagonist molecules specifically include agonist or antagonist antibodies or antibody fragments, fragments or amino acid sequence variants of native PRO polypeptides, peptides, antisense oligonucleotides, small organic molecules, etc. Methods for identifying agonists or antagonists of a PRO polypeptide may comprise contacting a PRO polypeptide with a candidate agonist or antagonist molecule and measuring a detectable change in one or more biological activities normally associated with the PRO polypeptide.

[0109] “Treatment” refers to both therapeutic treatment and prophylactic or preventative measures, wherein the object is to prevent or slow down (lessen) the targeted pathologic condition or disorder. Those in need of treatment include those already with the disorder as well as those prone to have the disorder or those in whom the disorder is to be prevented.

[0110] “Chronic” administration refers to administration of the agent(s) in a continuous mode as opposed to an acute mode, so as to maintain the initial therapeutic effect (activity) for an extended period of time. “Intermittent” administration is treatment that is not consecutively done without interruption, but rather is cyclic in nature.

[0111] “Mammal” for purposes of treatment refers to any animal classified as a mammal, including humans, domestic and farm animals, and zoo, sports, or pet animals, such as dogs, cats, cattle, horses, sheep, pigs, goats, rabbits, etc. Preferably, the mammal is human.

[0112] Administration “in combination with” one or more further therapeutic agents includes simultaneous (concurrent) and consecutive administration in any order.

[0113] “Carriers” as used herein include pharmaceutically acceptable carriers, excipients, or stabilizers which are nontoxic to the cell or mammal being exposed thereto at the dosages and concentrations employed. Often the physiologically acceptable carrier is an aqueous pH buffered solution. Examples of physiologically acceptable carriers include buffers such as phosphate, citrate, and other organic acids; antioxidants including ascorbic acid; low molecular weight (less than about 10 residues) polypeptide; proteins, such as serum albumin, gelatin, or immunoglobulins; hydrophilic polymers such as polyvinylpyrrolidone; amino acids such as glycine, glutamine, asparagine, arginine or lysine; monosaccharides, disaccharides, and other carbohydrates including glucose, mannose, or dextrins; chelating agents such as EDTA; sugar alcohols such as mannitol or sorbitol; salt-forming counterions such as sodium; and/or nonionic surfactants such as TWEEN™, polyethylene glycol (PEG), and PLURONICS™.

[0114] “Antibody fragments” comprise a portion of an intact antibody, preferably the antigen binding or variable region of the intact antibody. Examples of antibody fragments include Fab, Fab′, F(ab′)₂, and Fv fragments; diabodies; linear antibodies (Zapata et al., Protein Eng. 8(10): 1057-1062 [1995]); single-chain antibody molecules; and multispecific antibodies formed from antibody fragments.

[0115] Papain digestion of antibodies produces two identical antigen-binding fragments, called “Fab” fragments, each with a single antigen-binding site, and a residual “Fc” fragment, a designation reflecting the ability to crystallize readily. Pepsin treatment yields an F(ab′)₂ fragment that has two antigen-combining sites and is still capable of cross-linking antigen.

[0116] “Fv” is the minimum antibody fragment which contains a complete antigen-recognition and -binding site. This region consists of a dimer of one heavy- and one light-chain variable domain in tight, non-covalent association. It is in this configuration that the three CDRs of each variable domain interact to define an antigen-binding site on the surface of the V_{H}-V_{L} dimer. Collectively, the six CDRs confer antigen-binding specificity to the antibody. However, even a single variable domain (or half of an Fv comprising only three CDRs specific for an antigen) has the ability to recognize and bind antigen, although at a lower affinity than the entire binding site.

[0117] The Fab fragment also contains the constant domain of the light chain and the first constant domain (CH1) of the heavy chain. Fab fragments differ from Fab′ fragments by the addition of a few residues at the carboxy terminus of the heavy chain CH1 domain including one or more cysteines from the antibody hinge region. Fab′-SH is the designation herein for Fab′ in which the cysteine residue(s) of the constant domains bear a free thiol group. F(ab′)₂ antibody fragments originally were produced as pairs of Fab′ fragments which have hinge cysteines between them. Other chemical couplings of antibody fragments are also known.

[0118] The “light chains” of antibodies (immunoglobulins) from any vertebrate species can be assigned to one of two clearly distinct types, called kappa and lambda, based on the amino acid sequences of their constant domains.

[0119] Depending on the amino acid sequence of the constant domain of their heavy chains, immunoglobulins can be assigned to different classes. There are five major classes of immunoglobulins: IgA, IgD, IgE, IgG, and IgM, and several of these may be further divided into subclasses (isotypes), e.g., IgG1, IgG2, IgG3, IgG4, IgA, and IgA2.

[0120] “Single-chain Fv” or “sFv” antibody fragments comprise the V_{H} and V_{L} domains of antibody, wherein these domains are present in a single polypeptide chain. Preferably, the Fv polypeptide further comprises a polypeptide linker between the V_{H} and V_{L} domains which enables the sFv to form the desired structure for antigen binding. For a review of sFv, see Pluckthun in The Pharmacology of Monoclonal Antibodies, vol. 113, Rosenburg and Moore eds., Springer-Verlag, New York, pp. 269-315 (1994).

[0121] The term “diabodies” refers to small antibody fragments with two antigen-binding sites, which fragments comprise a heavy-chain variable domain (V_{H}) connected to a light-chain variable domain (V_{L}) in the same polypeptide chain (V_{H}-V_{L}). By using a linker that is too short to allow pairing between the two domains on the same chain, the domains are forced to pair with the complementary domains of another chain and create two antigen-binding sites. Diabodies are described more fully in, for example, EP 404,097; WO 93/11161; and Hollinger et al., Proc. Natl. Acad. Sci. USA, 90:6444-6448 (1993).

[0122] An “isolated” antibody is one which has been identified and separated and/or recovered from a component of its natural environment. Contaminant components of its natural environment are materials which would interfere with diagnostic or therapeutic uses for the antibody, and may include enzymes, hormones, and other proteinaceous or nonproteinaceous solutes. In preferred embodiments, the antibody will be purified (1) to greater than 95% by weight of antibody as determined by the Lowry method, and most preferably more than 99% by weight, (2) to a degree sufficient to obtain at least 15 residues of N-terminal or internal amino acid sequence by use of a spinning cup sequenator, or (3) to homogeneity by SDS-PAGE under reducing or nonreducing conditions using Coomassie blue or, preferably, silver stain. Isolated antibody includes the antibody in situ within recombinant cells since at least one component of the antibody's natural environment will not be present. Ordinarily, however, isolated antibody will be prepared by at least one purification step.

[0123] An antibody that “specifically binds to” or is “specific for” a particular polypeptide or an epitope on a particular polypeptide is one that binds to that particular polypeptide or epitope on a particular polypeptide without substantially binding to any other polypeptide or polypeptide epitope.

[0124] The word “label” when used herein refers to a detectable compound or composition which is conjugated directly or indirectly to the antibody so as to generate a “labeled” antibody. The label may be detectable by itself (e.g. radioisotope labels or fluorescent labels) or, in the case of an enzymatic label, may catalyze chemical alteration of a substrate compound or composition which is detectable.

[0125] By “solid phase” is meant a non-aqueous matrix to which the antibody of the present invention can adhere. Examples of solid phases encompassed herein include those formed partially or entirely of glass (e.g., controlled pore glass), polysaccharides (e.g., agarose), polyacrylamides, polystyrene, polyvinyl alcohol and silicones. In certain embodiments, depending on the context, the solid phase can comprise the well of an assay plate; in others it is a purification column (e.g., an affinity chromatography column). This term also includes a discontinuous solid phase of discrete particles, such as those described in U.S. Pat. No. 4,275,149.

[0126] A “liposome” is a small vesicle composed of various types of lipids, phospholipids and/or surfactant which is useful for delivery of a drug (such as a PRO polypeptide or antibody thereto) to a mammal. The components of the liposome are commonly arranged in a bilayer formation, similar to the lipid arrangement of biological membranes.

[0127] A “small molecule” is defined herein to have a molecular weight below about 500 Daltons.

[0128] The term “immune related disease” means a disease in which a component of the immune system of a mammal causes, mediates or otherwise contributes to a morbidity in the mammal. Also included are diseases in which stimulation or intervention of the immune response has an ameliorative effect on progression of the disease. Included within this term are immune-mediated inflammatory diseases, non-immune-mediated inflammatory diseases, infectious diseases, immunodeficiency diseases, neoplasia, etc.

[0129] The term “T cell mediated disease” means a disease in which T cells directly or indirectly mediate or otherwise contribute to a morbidity in a mammal. The T cell mediated disease may be associated with cell mediated effects, lymphokine mediated effects, etc., and even effects associated with B cells if the B cells are stimulated, for example, by the lymphokines secreted by T cells.

[0130] As used herein the term “psoriasis” is defined as a condition characterized by the eruption of circumscribed, discreet and confluent, reddish, silvery-scaled macropapules preeminently on the elbows, knees, scalp and trunk.

[0131] As used herein the term “Inflammatory bowel disease” is defined as inflammatory disorders in which the intestine (bowel) becomes inflamed, often causing recurring cramps or diarrhea.

[0132] The term “effective amount” is a concentration or amount of a PRO polypeptide and/or agonist/antagonist which results in achieving a particular stated purpose. An “effective amount” of a PRO polypeptide or agonist or antagonist thereof may be determined empirically. Furthermore, a “therapeutically effective amount” is a concentration or amount of a PRO polypeptide and/or agonist/antagonist which is effective for achieving a stated therapeutic effect. This amount may also be determined empirically.

[0133] The term “cytotoxic agent” as used herein refers to a substance that inhibits or prevents the function of cells and/or causes destruction of cells. The term is intended to include radioactive isotopes (e.g., I¹³¹, I¹²⁵, Y⁹⁰ and Re¹⁸⁶), chemotherapeutic agents, and toxins such as enzymatically active toxins of bacterial, fungal, plant or animal origin, or fragments thereof.

[0134] A “chemotherapeutic agent” is a chemical compound useful in the treatment of cancer. Examples of chemotherapeutic agents include adriamycin, doxorubicin, epirubicin, 5-fluorouracil, cytosine arabinoside (“Ara-C”), cyclophosphamide, thiotepa, busulfan, cytoxin, taxoids, e.g. paclitaxel (Taxol, Bristol-Myers Squibb Oncology, Princeton, N.J.), and doxetaxel (Taxotere, Rhône-Poulenc Rorer, Antony, France), toxotere, methotrexate, cisplatin, melphalan, vinblastine, bleomycin, etoposide, ifosfamide, mitomycin C, mitoxantrone, vincristine, vinorelbine, carboplatin, teniposide, daunomycin, caminomycin, aminopterin, dactinomycin, mitomycins, esperamicins (see U.S. Pat. No. 4,675,187), melphalan and other related nitrogen mustards. Also included in this definition are hormonal agents that act to regulate or inhibit hormone action on tumors such as tamoxifen and onapristone.

[0135] A “growth inhibitory agent” when used herein refers to a compound or composition which inhibits growth of a cell, especially cancer cell overexpressing any of the genes identified herein, either in vitro or in vivo. Thus, the growth inhibitory agent is one which significantly reduces the percentage of cells overexpressing such genes in S phase. Examples of growth inhibitory agents include agents that block cell cycle progression (at a place other than S phase), such as agents that induce G1 arrest and M-phase arrest. Classical M-phase blockers include the vincas (vincristine and vinblastine), taxol, and topo II inhibitors such as doxorubicin, epirubicin, daunorubicin, etoposide, and bleomycin. Those agents that arrest G1 also spill over into S-phase arrest, for example, DNA alkylating agents such as tamoxifen, prednisone, dacarbazine, mechlorethamine, cisplatin, methotrexate, 5-fluorouracil, and ara-C. Further information can be found in The Molecular Basis of Cancer, Mendelsohn and Israel, eds., Chapter 1, entitled “Cell cycle regulation, oncogens, and antineoplastic drugs” by Murakami et al. (WB Saunders: Philadelphia, 1995), especially p. 13.

[0136] The term “cytokine” is a generic term for proteins released by one cell population which act on another cell as intercellular mediators. Examples of such cytokines are lymphokines, monokines, and traditional polypeptide hormones. Included among the cytokines are growth hormone such as human growth hormone, N-methionyl human growth hormone, and bovine growth hormone; parathyroid hormone; thyroxine; insulin; proinsulin; relaxin; prorelaxin; glycoprotein hormones such as follicle stimulating hormone (FSH), thyroid stimulating hormone (TSH), and luteinizing hormone (LH); hepatic growth factor; fibroblast growth factor; prolactin; placental lactogen; tumor necrosis factor-α and -β; mullerian-inhibiting substance; mouse gonadotropin-associated peptide; inhibin; activin; vascular endothelial growth factor; integrin; thrombopoietin (TPO); nerve growth factors such as NGF-β; platelet-growth factor; transforming growth factors (TGFs) such as TGF-α and TGF-β; insulin-like growth factor-I and -II; erythropoietin (EPO); osteoinductive factors; interferons such as interferon-α, -β, and -γ; colony stimulating factors (CSFs) such as macrophage-CSF (M-CSF); granulocyte-macrophage-CSF (GM-CSF); and granulocyte-CSF (G-CSF); interleukins (ILs) such as IL-1, IL-1α, IL-2, IL-3, IL-4, IL-5, IL-6, IL-7, IL-8, IL-9, IL-11, IL-12; a tumor necrosis factor such as TNF-α or TNF-β; and other polypeptide factors including LIF and kit ligand (KL). As used herein, the term cytokine includes proteins from natural sources or from recombinant cell culture and biologically active equivalents of the native sequence cytokines.

[0137] As used herein, the term “immunoadhesin” designates antibody-like molecules which combine the binding specificity of a heterologous protein (an “adhesin”) with the effector functions of immunoglobulin constant domains. Structurally, the immunoadhesins comprise a fusion of an amino acid sequence with the desired binding specificity which is other than the antigen recognition and binding site of an antibody (i.e., is “heterologous”), and an immunoglobulin constant domain sequence. The adhesin part of an immunoadhesin molecule typically is a contiguous amino acid sequence comprising at least the binding site of a receptor or a ligand. The immunoglobulin constant domain sequence in the immunoadhesin may be obtained from any immunoglobulin, such as IgG-1, IgG-2, IgG-3, or IgG-4 subtypes, IgA (including IgA-1 and IgA-2), IgE, IgD or IgM.

[0138] As used herein, the term “inflammatory cells” designates cells that enhance the inflammatory response such as mononuclear cells, eosinophils, macrophages, and polymorphonuclear neutrophils (PMN).

TABLE 1
/*
*
* C-C increased from 12 to 15
* Z is average of EQ
* B is average of ND
* match with stop is _M; stop-stop = 0; J (joker) match = 0
*/

| | | | |
|---|---|---|---|
| #define | _M | −8 | /* value of a match with a stop */ |

| | |
|---|---|
| int | _day[26][26] = { |

| | |
|---|---|
| /* | A B C D E F G H I J K L M N O P Q R S T U V W X Y Z */ |

| | |
|---|---|
| /* A */ | { 2, 0,−2, 0, 0,−4, 1,−1,−1, 0,−1,−2,−1, 0,_M, 1, 0,−2, 1, 1, 0, 0,−6, 0,−3, 0}, |
| /* B */ | { 0, 3,−4, 3, 2,−5, 0, 1,−2, 0, 0,−3,−2, 2,_M,−1, 1, 0, 0, 0, 0,−2,−5, 0,−3, 1}, |
| /* C */ | {−2,−4,15,−5,−5,−4,−3,−3,−2, 0,−5,−6,−5,−4,_M,−3,−5,−4, 0,−2, 0,−2,−8, 0, 0,−5}, |
| /* D */ | { 0, 3,−5, 4, 3,−6, 1, 1,−2, 0, 0,−4,−3, 2,_M,−1, 2,−1, 0, 0, 0,−2,−7, 0,−4, 2}, |
| /* E */ | { 0, 2,−5, 3, 4,−5, 0, 1,−2, 0, 0,−3,−2, 1,_M,−1, 2,−1, 0, 0, 0,−2,−7, 0,−4, 3}, |
| /* F */ | {−4,−5,−4,−6,−5, 9,−5,−2, 1, 0,−5, 2, 0,−4,_M,−5,−5,−4,−3,−3, 0,−1, 0, 0, 7,−5}, |
| /* G */ | { 1, 0,−3, 1, 0,−5, 5,−2,−3, 0,−2,−4,−3, 0,_M,−1,−1,−3, 1, 0, 0,−1,−7, 0,−5, 0}, |
| /* H */ | {−1, 1,−3, 1, 1,−2,−2, 6,−2, 0, 0,−2,−2, 2,_M, 0, 3, 2,−1,−1, 0,−2,−3, 0, 0, 2}, |
| /* I */ | {−1,−2,−2,−2,−2, 1,−3,−2, 5, 0,−2, 2, 2,−2,_M,−2,−2,−2,−1, 0, 0, 4,−5, 0,−1,−2}, |
| /* J */ | { 0, 0, 0, 0, 0, 0, 0, 0, 0, 0, 0, 0, 0, 0,_M, 0, 0, 0, 0, 0, 0, 0, 0, 0, 0, 0}, |
| /* K */ | {−1, 0,−5, 0, 0,−5,−2, 0,−2, 0, 5,−3, 0, 1,_M,−1, 1, 3, 0, 0, 0,−2,−3, 0,−4, 0}, |
| /* L */ | {−2,−3,−6,−4,−3, 2,−4,−2, 2, 0,−3, 6, 4,−3,_M,−3,−2,−3,−3,−1, 0, 2,−2, 0,−1,−2}, |
| /* M */ | {−1,−2,−5,−3,−2, 0,−3,−2, 2, 0, 0, 4, 6,−2,_M,−2,−1, 0,−2,−1, 0, 2,−4, 0,−2,−1}, |
| /* N */ | { 0, 2,−4, 2, 1,−4, 0, 2,−2, 0, 1,−3,−2, 2,_M,−1, 1, 0, 1, 0, 0,−2,−4, 0,−2, 1}, |
| /* O */ | {_M,_M,_M,_M,_M,_M,_M,_M,_M,_M,_M,_M,_M,_M, |

0,_M,_M,_M,_M,_M,_M,_M,_M,_M,_M,_M},

| /* P */ | { 1,−1,−3,−1,−1,−5,−1, 0,−2, 0,−1,−3,−2,−1,_M, 6, 0, 0, 1, 0, 0,−1,−6, 0,−5, 0}, | | |
|---|---|---|---|
| /* Q */ | { 0, 1,−5, 2, 2,−5,−1, 3,−2, 0, 1,−2,−1, 1,_M, 0, 4, 1,−1,−1, 0,−2,−5, 0,−4, 3}, | | |
| /* R */ | {−2, 0,−4,−1,−1,−4,−3, 2,−2, 0, 3,−3, 0, 0,_M, 0, 1, 6, 0,−1, 0,−2, 2, 0,−4, 0}, | | |
| /* S */ | { 1, 0, 0, 0, 0,−3, 1,−1,−1, 0, 0,−3,−2, 1,_M, 1,−1, 0, 2, 1, 0,−1,−2, 0,−3, 0}, | | |
| /* T */ | { 1, 0,−2, 0, 0,−3, 0,−1, 0, 0, 0,−1,−1, 0,_M, 0,−1,−1, 1, 3, 0, 0,−5, 0,−3, 0}, | | |
| /* U */ | { 0, 0, 0, 0, 0, 0, 0, 0, 0, 0, 0, 0, 0, 0,_M, 0, 0, 0, 0, 0, 0, 0, 0, 0, 0, 0}, | | |
| /* V */ | { 0,−2,−2,−2,−2,−1,−1,−2, 4, 0,−2, 2, 2,−2,_M,−1,−2,−2,−1, 0, 0, 4,−6, 0,−2,−2}, | | |
| /* W */ | {−6,−5,−8,−7,−7, 0,−7,−3,−5, 0,−3,−2,−4,−4,_M,−6,−5, 2,−2,−5, 0,−6,17, 0, 0,−6}, | | |
| /* X */ | { 0, 0, 0, 0, 0, 0, 0, 0, 0, 0, 0, 0, 0, 0,_M, 0, 0, 0, 0, 0, 0, 0, 0, 0, 0, 0}, | | |
| /* Y */ | {−3,−3, 0,−4,−4, 7,−5, 0,−1, 0,−4,−1,−2,−2,_M,−5,−4,−4,−3,−3, 0,−2, 0, 0,10,−4}, | | |
| /* Z */ | { 0, 1,−5, 2, 3,−5, 0, 2,−2, 0, 0,−2,−1, 1,_M, 0, 3, 0, 0, 0, 0,−2,−6, 0,−4, 4} | | |
| }; | | | |
| /* | | | |
| */ | | | |
| #include | <stdio.h> | | |
| #include | <ctype.h> | | |
| #define | MAXJMP | 16 | /* max jumps in a diag */ |
| #define | MAXGAP | 24 | /* don't continue to penalize gaps larger than this */ |
| #define | JMPS | 1024 | /* max jmps in an path */ |
| #define | MX | 4 | /* save if there's at least MX−1 bases since last jmp */ |
| #define | DMAT | 3 | /* value of matching bases */ |
| #define | DMIS | 0 | /* penalty for mismatched bases */ |
| #define | DINS0 | 8 | /* penalty for a gap */ |
| #define | DINS1 | 1 | /* penalty per base */ |
| #define | PINS0 | 8 | /* penalty for a gap */ |
| #define | PINS1 | 4 | /* penalty per residue */ |

struct jmp {

| | | | |
|---|---|---|---|
| | short | n[MAXJMP]; | /* size of jmp (neg for dely) */ |
| | unsigned short | x[MAXJMP]; | /* base no. of jmp in seq x */ |
| }; | | | /* limits seq to 2\hat{ }16 −1 */ |

struct diag {

| | | |
|---|---|---|
| int | score; | /* score at last jmp */ |
| long | offset; | /* offset of prev block */ |
| short | ijmp; | /* current jmp index */ |
| struct jmp | jp; | /* list of jmps */ |

};
struct path {

| | | |
|---|---|---|
| int | spc; | /* number of leading spaces */ |

| | short | n[JMPS];/* size of jmp (gap) */ | |
|---|---|---|---|
| | int | x[JMPS];/* loc of jmp (last elem before gap) */ | |
| }; | | | |
| char | | *ofile; | /* output file name */ |
| char | | *namex[2]; | /* seq names: getseqs( ) */ |
| char | | *prog; | /* prog name for err msgs */ |
| char | | *seqx[2]; | /* seqs: getseqs( ) */ |
| int | | dmax; | /* best diag: nw( ) */ |
| int | | dmax0; | /* final diag */ |
| int | | dna; | /* set if dna: main( ) */ |
| int | | endgaps; | /* set if penalizing end gaps */ |
| int | | gapx, gapy; | /* total gaps in seqs */ |
| int | | len0, len1; | /* seq lens */ |
| int | | ngapx, ngapy; | /* total size of gaps */ |
| int | | smax; | /* max score: nw( ) */ |
| int | | *xbm; | /* bitmap for matching */ |
| long | | offset; | /* current offset in jmp file */ |
| struct | diag | *dx; | /* holds diagonals */ |
| struct | path | pp[2]; | /* holds path for seqs */ |

| | |
|---|---|
| char | *calloc( ), *malloc( ), *index( ), *strcpy( ); |
| char | *getseq( ), *g_calloc( ); |

/* Needleman-Wunsch alignment program
*
* usage: progs file1 file2
* where file1 and file2 are two dna or two protein sequences.
* The sequences can be in upper- or lower-case an may contain ambiguity
* Any lines beginning with ‘;’, ‘>’ or ‘<’ are ignored
* Max file length is 65535 (limited by unsigned short x in the jmp struct)
* A sequence with ⅓ or more of its elements ACGTU is assumed to be DNA
* Output is in the file “align.out”
*
* The program may create a tmp file in /tmp to hold info about traceback.
* Original version developed under BSD 4.3 on a vax 8650
*/

| | |
|---|---|
| #include | “nw.h” |
| #include | “day.h” |
| static | _dbval[26] = { |
| | 1,14,2,13,0,0,4,11,0,0,12,0,3,15,0,0,0,5,6,8,8,7,9,0,10,0 |
| }; | |
| static | _pbval[26] = { |
| | 1, 2\|(1<<(‘D’-‘A’))\|(1<<(‘N’-‘A’)), 4, 8, 16, 32, 64, |
| | 128, 256, 0xFFFFFFF, 1<<10, 1<<11, 1<<12, 1<<13, 1<<14, |
| | 1<<15, 1<<16, 1<<17, 1<<18, 1<<19, 1<<20, 1<<21, 1<<22, |
| | 1<<23, 1<<24, 1<<25\|(1<<(‘E’-‘A’))\|(1<<(‘Q’-‘A’)) |
| }; | |

main(ac, av)

| | | |
|---|---|---|
| | main | |
| | int | ac; |
| | char | *av[ ]; |
| { | | |

prog = av[0];
if (ac != 3) {

fprintf(stderr,”usage: %s file1 file2\n”, prog);
fprintf(stderr,”where file1 and file2 are two dna or two protein sequences.\n”);
fprintf(stderr,”The sequences can be in upper- or lower-case\n”);
fprintf(stderr,”Any lines beginning with ‘;’ or ‘<’ are ignored\n”);
fprintf(stderr,”Output is in the file \”align.out\”\n”);
exit(1);

| } | |
|---|---|
| namex[0] = av[1]; | |
| namex[1] = av[2]; | |
| seqx[0] = getseq(namex[0], &len0); | |
| seqx[1] = getseq(namex[1], &len1); | |
| xbm = (dna)? _dbval : _pbval; | |
| endgaps = 0; | /* 1 to penalize endgaps */ |
| ofile = “align.out”; | /* output file */ |

| | |
|---|---|
| nw( ); | /* fill in the matrix, get the possible jmps */ |
| readjmps( ); | /* get the actual jmps */ |
| print( ); | /* print stats, alignment */ |
| cleanup(0); | /* unlink any tmp files */ |

}
/* do the alignment, return best score: main( )
* dna: values in Fitch and Smith, PNAS, 80, 1382-1386, 1983
* pro: PAM 250 values
* When scores are equal, we prefer mismatches to any gap, prefer
* a new gap to extending an ongoing gap, and prefer a gap in seqx
* to a gap in seq y.
*/
nw( )

nw

{

| | | |
|---|---|---|
| char | *px, *py; | /* seqs and ptrs */ |
| int | *ndely, *dely; | /* keep track of dely */ |
| int | ndelx, delx; | /* keep track of delx */ |
| int | *tmp; | /* for swapping row0, row1 */ |
| int | mis; | /* score for each type */ |
| int | ins0, ins1; | /* insertion penalties */ |
| register | id; | /* diagonal index */ |
| register | ij; | /* jmp index */ |
| register | *col0, *col1; | /* score for curr, last row */ |
| register | xx, yy; | /* index into seqs */ |

dx = (struct diag *)g_calloc(“to get diags”, len0+len1+1, sizeof(struct diag));
ndely = (int *)g_calloc(“to get ndely”, len1+1, sizeof(int));
dely = (int *)g_calloc(“to get dely”, len1+1, sizeof(int));
col0 = (int *)g_calloc(“to get col0”, len1+1, sizeof(int));
col1 = (int *)g_calloc(“to get col1”, len1+1, sizeof(int));
ins0 = (dna)? DINS0 : PINS0;
ins1 = (dna)? DINS1 : PINS1;
smax = −10000;
if (endgaps) {

for (col0[0] = dely[0] = −ins0, yy = 1; yy <= len1; yy++) {

col0[yy] = dely[yy] = col0[yy−1] − ins1;
ndely[yy] = yy;

| | |
|---|---|
| } | |
| col0[0] = 0; | /* Waterman Bull Math Biol 84 */ |

}
else

for (yy = 1; yy <= len1; yy++)

dely[yy] = −ins0;

/* fill in match matrix
*/
for (px = seqx[0], xx = 1; xx <= len0; px++, xx++) {

/* initialize first entry in col
*/
if (endgaps) {

if (xx == 1)

col1[0] = delx = −(ins0+ins1);

else

col1[0] = delx = col0[0] − ins1;

ndelx = xx;

}
else {

col1[0] = 0;
delx = −ins0;
ndelx = 0;

}

...nw

for (py = seqx[1], yy = 1; yy <= len1; py++, yy++) {

mis = col0[yy−1];
if (dna)

mis += (xbm[*px−‘A’]&xbm[*py−‘A’])? DMAT : DMIS;

else

mis += _day[*px−‘A’][*py−‘A’];

/* update penalty for del in x seq;
* favor new del over ongong del
* ignore MAXGAP if weighting endgaps
*/
if (endgaps || ndely[yy] < MAXGAP) {

if (col0[yy] − ins0 >= dely[yy]) {

dely[yy] = col0[yy] − (ins0+ins1);
ndely[yy] = 1;

} else {

dely[yy] −= ins1;
ndely[yy]++;

}

} else {

if (col0[yy] − (ins0+ins1) >= dely[yy]) {

dely[yy] = col0[yy] − (ins0+ins1);
ndely[yy] = 1;

} else

ndely[yy]++;

}
/* update penalty for del in y seq;
* favor new del over ongong del
*/
if (endgaps || ndelx < MAXGAP) {

if (col1[yy−1] − ins0 >= delx) {

delx = col1[yy−1] − (ins0+ins1);
ndelx = 1;

} else {

delx −= ins1;
ndelx++;

}

} else {

if (col1[yy−1] − (ins0+ins1) >= delx) {

delx = col1[yy−1] − (ins0+ins1);
ndelx = 1;

} else

ndelx++;

}
/* pick the maximum score; we're favoring
* mis over any del and delx over dely
*/

...nw

id = xx − yy + len1 − 1;
if (mis >= delx && mis >= dely[yy])

col1[yy] = mis;

else if (delx >= dely[yy]) {

col1[yy] = delx;
ij = dx[id].ijmp;
if (dx[id].jp.n[0] && (!dna || (ndelx >= MAXJMP
&& xx > dx[id].jp.x[ij]+MX) || mis > dx[id].score+DINS0)) {

dx[id].ijmp++;
if (++ij >= MAXJMP) {

writejmps(id);
ij = dx[id].ijmp = 0;
dx[id].offset = offset;
offset += sizeof(struct jmp) + sizeof(offset);

}

}
dx[id].jp.n[ij] = ndelx;
dx[id].jp.x[ij] = xx;
dx[id].score = delx;

}
else {

col1[yy] = dely[yy];
ij = dx[id].ijmp;

if (dx[id].jp.n[0] && (!dna || (ndely[yy] >= MAXJMP

&& xx > dx[id].jp.x[ij]+MX) || mis > dx[id].score+DINS0)) {

dx[id].ijmp++;
if (++ij >= MAXJMP) {

writejmps(id);
ij = dx[id].ijmp = 0;
dx[id].offset = offset;
offset += sizeof(struct jmp) + sizeof(offset);

}

}
dx[id].jp.n[ij] = −ndely[yy];
dx[id].jp.x[ij] = xx;
dx[id].score = dely[yy];

}
if (xx == len0 && yy < len1) {

/* last col
*/
if (endgaps)

col1[yy] −= ins0+ins1*(len1−yy);

if (col1[yy] > smax) {

smax = col1[yy];
dmax = id;

}

}

}
if (endgaps && xx < len0)

col1[yy−1] −= ins0+ins1*(len0−xx);

if (col1[yy−1] > smax) {

smax = col1[yy−1];
dmax = id;

}
tmp = col0; col0 = col1; col1 = tmp;

| | |
|---|---|
| } | |
| (void) free((char *)ndely); | |
| (void) free((char *)dely); | |
| (void) free((char *)col0); | |
| (void) free((char *)col1); | } |
| /* | |
| * | |

* print( ) -- only routine visible outside this module
*
* static:
* getmat( ) -- trace back best path, count matches: print( )
* pr_align( ) -- print alignment of described in array p[ ]: print( )
* dumpblock( ) -- dump a block of lines with numbers, stars: pr_align( )
* nums( ) -- put out a number line: dumpblock( )
* putline( ) -- put out a line (name, [num], seq, [num]): dumpblock( )
* stars( ) - -put a line of stars: dumpblock( )
* stripname( ) -- strip any path and prefix from a seqname
*/

| | |
|---|---|
| #include | “nw.h” |

| | | | |
|---|---|---|---|
| #define | SPC | 3 | |
| #define | P_LINE | 256 | /* maximum output line */ |
| #define | P_SPC | 3 | /* space between name or num and seq */ |

| | | |
|---|---|---|
| extern | _day[26][26]; | |
| int | olen; | /* set output line length */ |
| FILE | *fx; | /* output file */ |
| print( ) | | |
| | print | |
| { | | |

| | | |
|---|---|---|
| int | lx, ly, firstgap, lastgap; | /* overlap */ |

if ((fx = fopen(ofile, “w”)) == 0) {

fprintf(stderr,”%s: can't write %s\n”, prog, ofile);
cleanup(1);

| } | |
|---|---|
| fprintf(fx, “<first sequence: %s (length = %d)\n”, namex[0], len0); | |
| fprintf(fx, “<second sequence: %s (length = %d)\n”, namex[1], len1); | |
| olen = 60; | |
| lx = len0; | |
| ly = len1; | |
| firstgap = lastgap = 0; | |
| if (dmax < len1 − 1) { | /* leading gap in x */ |

pp[0].spc = firstgap = len1 − dmax − 1;
ly −= pp[0].spc;

| | |
|---|---|
| } | |
| else if (dmax > len1 − 1) { | /* leading gap in y */ |

pp[1].spc = firstgap = dmax − (len1 − 1);
lx −= pp[1].spc;

| | |
|---|---|
| } | |
| if (dmax0 < len0 − 1) { | /* trailing gap in x */ |

lastgap = len0 − dmax0 −1;
lx −= lastgap;

| | |
|---|---|
| } | |
| else if (dmax0 > len0 − 1) { | /* trailing gap in y */ |

lastgap = dmax0 − (len0 − 1);
ly −= lastgap;

}
getmat(lx, ly, firstgap, lastgap);
pr_align( );

}
/*
* trace back the best path, count matches
*/
static

| getmat(lx, ly, firstgap, lastgap) | | | getmat |
|---|---|---|---|
| | int | lx, ly; | /* “core” (minus endgaps) */ |
| | int | firstgap, lastgap; | /* leading trailing overlap */ |

{

| | |
|---|---|
| int | nm, i0, i1, siz0, siz1; |
| char | outx[32]; |
| double | pct; |
| register | n0, n1; |
| register char | *p0, *p1; |

/* get total matches, score
*/
i0 = i1 = siz0 = siz1 = 0;
p0 = seqx[0] + pp[1].spc;
p1 = seqx[1] + pp[0].spc;
n0 = pp[1].spc + 1;
n1 = pp[0].spc + 1;
nm = 0;
while ( *p0 && *p1 ) {

if (siz0) {

p1++;
n1++;
siz0−−;

}
else if (siz1) {

p0++;
n0++;
siz1−−;

}
else {

if (xbm[*p0−‘A’]&xbm[*p1−‘A’])

nm++;

if (n0++ == pp[0].x[i0])

siz0 = pp[0].n[i0++];

if (n1++ == pp[1].x[i1])

siz1 = pp[1].n[i1++];

p0++;
p1++;

}

}
/* pct homology:
* if penalizing endgaps, base is the shorter seq
* else, knock off overhangs and take shorter core
*/
if (endgaps)

lx = (len0 < len1)? len0 : len1;

else

lx = (lx < ly)? lx : ly;

pct = 100.*(double)nm/(double)lx;
fprintf(fx, “\n”);
fprintf(fx, “<%d match%s in an overlap of %d: %.2f percent similarity\n”,

nm, (nm == 1)? ““ : “es”, lx, pct);

fprintf(fx, “<gaps in first sequence: %d”, gapx);
...getmat
if (gapx) {

(void) sprintf(outx, “ (%d %s%s)”,

ngapx, (dna)? “base”:”residue”, (ngapx == 1)? ““:”s”);

fprintf(fx,”%s”, outx);

fprintf(fx, “, gaps in second sequence: %d”, gapy);
if (gapy) {

(void) sprintf(outx, “ (%d %s%s)”,

ngapy, (dna)? “base”:”residue”, (ngapy == 1)? ““:”s”);

fprintf(fx,”%s”, outx);

}
if (dna)

fprintf(fx,
“\n<score: %d (match = %d, mismatch = %d, gap penalty = %d + %d per base)\n”,
smax, DMAT, DMIS, DINS0, DINS1);

else

fprintf(fx,
“\n<score: %d (Dayhoff PAM 250 matrix, gap penalty = %d + %d per residue)\n”,
smax, PINS0, PINS1);

if (endgaps)

fprintf(fx,
“<endgaps penalized. left endgap: %d %s%s, right endgap: %d %s%s\n”,
firstgap, (dna)? “base” : “residue”, (firstgap == 1)? ““ : “s”,
lastgap, (dna)? “base” : “residue”, (lastgap == 1)? ““ : “s”);

else

| | fprintf(fx, “<endgaps not penalized\n”); | |
|---|---|---|
| } | | |
| static | nm; | /* matches in core -- for checking */ |
| static | lmax; | /* lengths of stripped file names */ |
| static | ij[2]; | /* jmp index for a path */ |
| static | nc[2]; | /* number at start of current line */ |
| static | ni[2]; | /* current elem number -- for gapping */ |
| static | siz[2]; | |
| static char | *ps[2]; | /* ptr to current element */ |
| static char | *po[2]; | /* ptr to next output char slot */ |
| static char | out[2][P_LINE]; | /* output line */ |
| static char | star[P_LINE]; | /* set by stars( ) */ |

/*
* print alignment of described in struct path pp[ ]
*/
static
pr_align( )

pr_align

{

| | | |
|---|---|---|
| int | nn; | /* char count */ |
| int | more; | |
| register | i; | |

for (i = 0, lmax = 0; i < 2; i++) {

nn = stripname(namex[i]);
if (nn > lmax)

lmax = nn;

| | |
|---|---|
| nc[i] = 1; | |
| ni[i] = 1; | |
| siz[i] = ij[i] = 0; | |
| ps[i] = seqx[i]; | |
| po[i] = out[i]; | } |

for (nn = nm = 0, more = 1; more; ) {
...pr_align

for (i = more = 0; i < 2; i++) {

/*
* do we have more of this sequence?
*/
if (!*ps[i])

continue;

| more++; | |
|---|---|
| if (pp[i].spc) { | /* leading space */ |

*po[i]++ = ‘ ’;
pp[i].spc−−;

| | |
|---|---|
| } | |
| else if (siz[i]) { | /* in a gap */ |

*po[i]++ = ‘-’;
siz[i]−−;

| | |
|---|---|
| } | |
| else { | /* we're putting a seq element |
| | */ |

*po[i] = *ps[i];
if (islower(*ps[i]))

*ps[i] = toupper(*ps[i]);

po[i]++;
ps[i]++;
/*
* are we at next gap for this seq?
*/
if (ni[i] == pp[i].x[ij[i]]) {

/*
* we need to merge all gaps
* at this location
*/
siz[i] = pp[i].n[ij[i]++];
while (ni[i] == pp[i].x[ij[i]])

siz[i] += pp[i].n[ij[i]++];

}
ni[i]++;

}

}
if (++nn == olen || !more && nn) {

dumpblock( );
for (i = 0; i < 2; i++)

po[i] = out[i];

nn = 0;

}

}

}
/*
* dump a block of lines, including numbers, stars: pr_align( )
*/
static
dumpblock( )

dumpblock

{

register i;
for (i = 0; i < 2; i++)
*po[i]−− = ‘\0’;

...dumpblock

(void) putc(‘\n’, fx);
for (i = 0; i < 2; i++) {

if (*out[i] && (*out[i] != ‘ ’ || *(po[i]) != ‘ ’)) {

if (i == 0)

nums(i);

if (i == 0 && *out[1])

stars( );

putline(i);
if (i == 0 && *out[1])

fprintf(fx, star);

if (i == 1)

nums(i);

}

}

}
/*
* put out a number line: dumpblock( )
*/
static

| | |
|---|---|
| nums(ix) | nums |

| | | |
|---|---|---|
| int | ix; | /* index in out[ ] holding seq line */ |

{

| | |
|---|---|
| char | nline[P_LINE]; |
| register | i, j; |
| register char | *pn, *px, *py; |

for (pn = nline, i = 0; i < lmax+P_SPC; i++, pn++)

*pn = ‘ ’;

for (i = nc[ix], py = out[ix]; *py; py++, pn++) {

if (*py == ‘ ’ || *py == ‘-’)

*pn = ‘ ’;

else {

if (i%10 == 0 || (i == 1 && nc[ix] != 1)) {

j = (i < 0)? −i : i;
for (px = pn; j; j /= 10, px−−)

*px = j%10 + ‘0’;

if (i < 0)

*px = ‘-’;

}
else

*pn = ‘ ’;

i++;

}

}
*pn = ‘\0’;
nc[ix] = i;
for (pn = nline; *pn; pn++)

(void) putc(*pn, fx);

(void) putc(‘\n’, fx);

}
/*
* put out a line (name, [num], seq, [num]): dumpblock( )
*/
static

| putline(ix) | | | putline |
|---|---|---|---|
| | int | ix; | { |

...putline

| | |
|---|---|
| int | i; |
| register char | *px; |

for (px = namex[ix], i = 0; *px && *px != ‘:’; px++, i++)

(void) putc(*px, fx);

for (; i < lmax+P_SPC; i++)

(void) putc(‘ ’, fx);

/* these count from 1:
* ni[ ] is current element (from 1)
* nc[ ] is number at start of current line
*/
for (px = out[ix]; *px; px++)

(void) putc(*px&0x7F, fx);

(void) putc(‘\n’, fx);

}
/*
* put a line of stars (seqs always in out[0], out[1]): dumpblock( )
*/
static
stars( )

stars

{

| | |
|---|---|
| int | i; |
| register char | *p0, *p1, cx, *px; |

if (!*out[0] || (*out[0] == ‘ ’ && *(po[0]) == ‘ ’) ||
!*out[1] || (*out[1] == ‘ ’ && *(po[1]) == ‘ ’))

return;

px = star;
for (i = lmax+P_SPC; i; i−−)

*px++ = ‘ ’;

for (p0 = out[0], p1 = out[1]; *p0 && *p1; p0++, p1++) {

if (isalpha(*p0) && isalpha(*p1)) {

if (xbm[*p0−‘A’]&xbm[*p1−‘A’]) {

cx = ‘*’;
nm++;

}
else if (!dna && _day[*p0−‘A’][*p1−‘A’] > 0)

cx = ‘.’;

else

cx = ‘ ’;

}
else

cx = ‘ ’;

*px++ = cx;

}
*px++ = ‘\n’;
*px = ‘\0’;

}
/*
* strip path or prefix from pn, return len: pr_align( )
*/
static
stripname(pn)

| stripname | | |
|---|---|---|
| char | *pn; | /* file name (may be path) */ |

{

| | |
|---|---|
| register char | *px, *py; |

py = 0;
for (px = pn; *px; px++)

if (*px == ‘/’)

py = px + 1;

if (py)

(void) strcpy(pn, py);

return(strlen(pn));

}
/*
* cleanup( ) -- cleanup any tmp file
* getseq( ) -- read in seq, set dna, len, maxlen
* g_calloc( ) -- calloc( ) with error checkin
* readjmps( ) -- get the good jmps, from tmp file if necessary
* writejmps( ) -- write a filled array of jmps to a tmp file: nw( )
*/

| | | |
|---|---|---|
| #include | “nw.h” | |
| #include | <sys/file.h> | |
| char | *jname = “/tmp/homgXXXXXX”; | /* tmp file for jmps */ |
| FILE | *fj; | |
| int | cleanup( ); | /* cleanup tmp file */ |
| long | lseek( ); | |

| | |
|---|---|
| /* | |
| * remove any tmp file if we blow | |
| */ | |
| cleanup(i) | cleanup |

| | | |
|---|---|---|
| | int | i; |
| { | | |
| | if (fj) | |
| | | (void) unlink(jname); |
| | exit(i); | |
| } | | |

/*
* read, return ptr to seq, set dna, len, maxlen
* skip lines starting with ‘;’, ‘<’, or ‘>’
* seq in upper or lower case
*/

| | |
|---|---|
| char | * |

| | |
|---|---|
| getseq(file, len) | getseq |

| | | |
|---|---|---|
| char | *file; | /* file name */ |
| int | *len; | /* seq len */ |

{

| | |
|---|---|
| char | line[1024], *pseq; |
| register char | *px, *py; |
| int | natgc, tlen; |
| FILE | *fp; |

if ((fp = fopen(file,”r”)) == 0) {

fprintf(stderr,”%s: can't read %s\n”, prog, file);
exit(1);

}
tlen = natgc = 0;
while (fgets(line, 1024, fp)) {

if (*line == ‘;’ || *line == ‘<’ || *line == ‘>’)

continue;

for (px = line; *px != ‘\n’; px++)

if (isupper(*px) || islower(*px))

tlen++;

}
if ((pseq = malloc((unsigned)(tlen+6))) == 0) {

fprintf(stderr,”%s: malloc( ) failed to get %d bytes for %s\n”, prog, tlen+6, file);
exit(1);

}
pseq[0] = pseq[1] = pseq[2] = pseq[3] = ‘\0’;

...getseq

py = pseq + 4;
*len = tlen;
rewind(fp);
while (fgets(line, 1024, fp)) {

if (*line == ‘;’ || *line == ‘<’ || *line == ‘>’)

continue;

for (px = line; *px != ‘\n’; px++) {

if (isupper(*px))

*py++ = *px;

else if (islower(*px))

*py++ = toupper(*px);

if (index(“ATGCU”,*(py−1)))

natgc++;

}

| | } |
|---|---|
| | *py++ = ‘\0’; |
| | *py = ‘\0’; |
| | (void) fclose(fp); |
| | dna = natgc > (tlen/3); |
| | return(pseq+4); |
| } | |
| char | * |

| | |
|---|---|
| g_calloc(msg, nx, sz) | g_calloc |

| | | |
|---|---|---|
| char | *msg; | /* program, calling routine */ |
| int | nx, sz; | /* number and size of elements */ |

{

| | |
|---|---|
| char | *px, *calloc( ); |

if ((px = calloc((unsigned)nx, (unsigned)sz)) == 0) {

if (*msg) {

fprintf(stderr, “%s: g_calloc( ) failed %s (n=%d, sz=%d)\n”, prog, msg, nx, sz);
exit(1);

}

}
return(px);

}
/*
* get final jmps from dx[ ] or tmp file, set pp[ ], reset dmax: main( )
*/
readjmps( )

readjmps

{

| | |
|---|---|
| int | fd = −1; |
| int | siz, i0, i1; |

| | |
|---|---|
| register | i, j, xx; |
| if (fj) { | |
| | (void) fclose(fj); |

if ((fd = open(jname, O_RDONLY, 0)) < 0) {

fprintf(stderr, “%s: can't open( ) %s\n”, prog, jname);
cleanup(1);

}

}
for (i = i0 = i1 = 0, dmax0 = dmax, xx = len0; ; i++) {

while (1) {

for (j = dx[dmax].ijmp; j >= 0 && dx[dmax].jp.x[j] >= xx; j−−)

;

...readjmps

if (j < 0 && dx[dmax].offset && fj) {

(void) lseek(fd, dx[dmax].offset, 0);
(void) read(fd, (char *)&dx[dmax].jp, sizeof(struct jmp));
(void) read(fd, (char *)&dx[dmax].offset, sizeof(dx[dmax].offset));
dx[dmax].ijmp = MAXJMP−1;

}
else

break;

}
if (i >= JMPS) {

fprintf(stderr, “%s: too many gaps in alignment\n”, prog);
cleanup(1);

}
if (j >= 0) {

| | |
|---|---|
| siz = dx[dmax].jp.n[j]; | |
| xx = dx[dmax].jp.x[j]; | |
| dmax += siz; | |
| if (siz < 0) { | /* gap in second seq */ |

pp[1].n[i1] = −siz;
xx += siz;
/* id = xx − yy + len1 − 1
*/
pp[1].x[i1] = xx − dmax + len1 − 1;
gapy++;
ngapy −= siz;

/* ignore MAXGAP when doing endgaps */

siz = (−siz < MAXGAP || endgaps)? −siz : MAXGAP;
i1++;

}
else if (siz > 0) { /* gap in first seq */

pp[0].n[i0] = siz;
pp[0].x[i0] = xx;
gapx++;
ngapx += siz;

/* ignore MAXGAP when doing endgaps */

siz = (siz < MAXGAP || endgaps)? siz : MAXGAP;
i0++;

}

}
else

break;

}
/* reverse the order of jmps
*/
for (j = 0, i0−−; j < i0; j++, i0−−) {

i = pp[0].n[j]; pp[0].n[j] = pp[0].n[i0]; pp[0].n[i0] = i;
i = pp[0].x[j]; pp[0].x[j] = pp[0].x[i0]; pp[0].x[i0] = i;

}
for (j = 0, i1−−; j < i1; j++, i1−−) {

i = pp[1].n[j]; pp[1].n[j] = pp[1].n[i1]; pp[1].n[i1] = i;
i = pp[1].x[j]; pp[1].x[j] = pp[1].x[i1]; pp[1].x[i1] = i;

}
if (fd >= 0)

(void) close(fd);

if (fj) {

(void) unlink(jname);
fj = 0;
offset = 0;

| | |
|---|---|
| } | } |

/*
* write a filled jmp struct offset of the prev one (if any): nw( )
*/
writejmps(ix)

| writejmps | |
|---|---|
| int | ix; |

{

| | |
|---|---|
| char | *mktemp( ); |
| if (!fj) { | |
| | if (mktemp(jname) < 0) { |

fprintf(stderr, “%s: can't mktemp( ) %s\n”, prog, jname);
cleanup(1);

}
if ((fj = fopen(jname, “w”)) == 0) {

fprintf(stderr, “%s: can't write %s\n”, prog, jname);
exit(1);

}

}
(void) fwrite((char *)&dx[ix].jp, sizeof(struct jmp), 1, fj);
(void) fwrite((char *)&dx[ix].offset, sizeof(dx[ix].offset), 1, fj);
}

TABLE 2

| | | |
|---|---|---|
| PRO | XXXXXXXXXXXXXXX | (Length = 15 amino acids) |
| Comparison | XXXXXYYYYYYY | (Length = 12 amino acids) |
| Protein | | |

% amino acid sequence identity = (the number of identically matching amino acid residues between the two polypeptide sequences as determined by ALIGN-2) divided by (the total number of amino acid residues of the PRO polypeptide) = 5 divided by 15 = 33.3%

TABLE 3

| | | |
|---|---|---|
| PRO | XXXXXXXXXX | (Length = 10 amino acids) |
| Comparison | XXXXXYYYYYYZZYZ | (Length = 15 amino acids) |
| Protein | | |

% amino acid sequence identity = (the number of identically matching amino acid residues between the two polypeptide sequences as determined by ALIGN-2) divided by (the total number of amino acid residues of the PRO polypeptide) = 5 divided by 10 = 50%

TABLE 4

| | | |
|---|---|---|
| PRO-DNA | NNNNNNNNNNNNNN | (Length = 14 nucleotides) |
| Comparison | NNNNNNLLLLLLLLLL | (Length = 16 nucleotides) |
| DNA | | |

% nucleic acid sequence identity = (the number of identically matching nucleotides between the two nucleic acid sequences as determined by ALIGN-2) divided by (the total number of nucleotides of the PRO-DNA nucleic acid sequence) = 6 divided by 14 = 42.9%

TABLE 5

| | | |
|---|---|---|
| PRO-DNA | NNNNNNNNNNNN | (Length = 12 nucleotides) |
| Comparison DNA | NNNNLLLVV | (Length = 9 nucleotides) |

% nucleic acid sequence identity = (the number of identically matching nucleotides between the two nucleic acid sequences as determined by ALIGN-2) divided by (the total number of nucleotides of the PRO-DNA nucleic acid sequence) = 4 divided by 12 = 33.3%

### II. Compositions and Methods of the Invention

[0139] A. Full-Length PRO Polypeptides

[0140] The present invention provides newly identified and isolated nucleotide sequences encoding polypeptides referred to in the present application as PRO polypeptides. In particular, cDNAs encoding various PRO polypeptides have been identified and isolated, as disclosed in further detail in the Examples below. However, for sake of simplicity, in the present specification the protein encoded by the full length native nucleic acid molecules disclosed herein as well as all further native homologues and variants included in the foregoing definition of PRO, will be referred to as “PRO/number”, regardless of their origin or mode of preparation.

[0141] As disclosed in the Examples below, the sequence of various cDNA clones have been disclosed. The predicted amino acid sequence can be determined from the nucleotide sequence using routine skill. For the PRO polypeptides and encoding nucleic acids described herein, Applicants have identified what is believed to be the reading frame best identifiable with the sequence information available at the time.

[0142] B. PRO Polypeptide Variants

[0143] In addition to the full-length native sequence PRO polypeptides described herein, it is contemplated that PRO variants can be prepared. PRO variants can be prepared by introducing appropriate nucleotide changes into the PRO DNA, and/or by synthesis of the desired PRO polypeptide. Those skilled in the art will appreciate that amino acid changes may alter post-translational processes of the PRO, such as changing the number or position of glycosylation sites or altering the membrane anchoring characteristics.

[0144] Variations in the native full-length sequence PRO or in various domains of the PRO described herein, can be made, for example, using any of the techniques and guidelines for conservative and non-conservative mutations set forth, for instance, in U.S. Pat. No. 5,364,934. Variations may be a substitution, deletion or insertion of one or more codons encoding the PRO that results in a change in the amino acid sequence of the PRO as compared with the native sequence PRO. Optionally, the variation is by substitution of at least one amino acid with any other amino acid in one or more of the domains of the PRO. Guidance in determining which amino acid residue may be inserted, substituted or deleted without adversely affecting the desired activity may be found by comparing the sequence of the PRO with that of homologous known protein molecules and minimizing the number of amino acid sequence changes made in regions of high homology. Amino acid substitutions can be the result of replacing one amino acid with another amino acid having similar structural and/or chemical properties, such as the replacement of a leucine with a serine, i.e., conservative amino acid replacements. Insertions or deletions may optionally be in the range of about 1 to 5 amino acids. The variation allowed may be determined by systematically making insertions, deletions or substitutions of amino acids in the sequence and testing the resulting variants for activity exhibited by the full-length or mature native sequence.

[0145] PRO polypeptide fragments are provided herein. Such fragments may be truncated at the N-terminus or C-terminus, or may lack internal residues, for example, when compared with a full length native protein. Certain fragments lack amino acid residues that are not essential for a desired biological activity of the PRO polypeptide.

[0146] PRO fragments may be prepared by any of a number of conventional techniques. Desired peptide fragments may be chemically synthesized. An alternative approach involves generating PRO fragments by enzymatic digestion, e.g., by treating the protein with an enzyme known to cleave proteins at sites defined by particular amino acid residues, or by digesting the DNA with suitable restriction enzymes and isolating the desired fragment. Yet another suitable technique involves isolating and amplifying a DNA fragment encoding a desired polypeptide fragment, by polymerase chain reaction (PCR). Oligonucleotides that define the desired termini of the DNA fragment are employed at the 5′ and 3′ primers in the PCR. Preferably, PRO polypeptide fragments share at least one biological and/or immunological activity with the native PRO polypeptide disclosed herein.

[0147] In particular embodiments, conservative substitutions of interest are shown in Table 6 under the heading of preferred substitutions. If such substitutions result in a change in biological activity, then more substantial changes, denominated exemplary substitutions in Table 6, or as further described below in reference to amino acid classes, are introduced and the products screened.

TABLE 6

| Original | Exemplary | Preferred |
|---|---|---|
| Residue | Substitutions | Substitutions |
| Ala (A) | val; leu; ile | val |
| Arg (R) | lys; gln; asn | lys |
| Asn (N) | gln; his; lys; arg | gln |
| Asp (D) | glu | glu |
| Cys (C) | ser | ser |
| Gln (Q) | asn | asn |
| Glu (E) | asp | asp |
| Gly (G) | pro; ala | ala |
| His (H) | asn; gln; lys; arg | arg |
| Ile (I) | leu; val; met; ala; phe; | leu |
| | norleucine | |
| Leu (L) | norleucine; ile; val; | ile |
| | met; ala; phe | |
| Lys (K) | arg; gln; asn | arg |
| Met (M) | leu; phe; ile | leu |
| Phe (F) | leu; val; ile; ala; tyr | leu |
| Pro (P) | ala | ala |
| Ser (S) | thr | thr |
| Thr (T) | ser | ser |
| Trp (W) | tyr; phe | tyr |
| Tyr (Y) | trp; phe; thr; ser | phe |
| Val (V) | ile; leu; met; phe; | leu |
| | ala; norleucine | |

[0148] Substantial modifications in function or immunological identity of the PRO polypeptide are accomplished by selecting substitutions that differ significantly in their effect on maintaining (a) the structure of the polypeptide backbone in the area of the substitution, for example, as a sheet or helical conformation, (b) the charge or hydrophobicity of the molecule at the target site, or (c) the bulk of the side chain. Naturally occurring residues are divided into groups based on common side-chain properties:

(1) hydrophobic: norleucine, met, ala, val, leu, ile;
(2) neutral hydrophilic: cys, ser, thr;
(3) acidic: asp, glu;
(4) basic: asn, gln, his, lys, arg;
(5) residues that influence chain orientation: gly, pro; and
(6) aromatic: trp, tyr, phe.

[0149] Non-conservative substitutions will entail exchanging a member of one of these classes for another class. Such substituted residues also may be introduced into the conservative substitution sites or, more preferably, into the remaining (non-conserved) sites.

[0150] The variations can be made using methods known in the art such as oligonucleotide-mediated (site-directed) mutagenesis, alanine scanning, and PCR mutagenesis. Site-directed mutagenesis [Carter et al., Nucl. Acids Res., 13:4331 (1986); Zoller et al., Nucl. Acids Res., 10:6487 (1987)], cassette mutagenesis [Wells et al., Gene, 34:315 (1985)], restriction selection mutagenesis [Wells et al., Philos. Trans. R. Soc. London SerA, 317:415 (1986)] or other known techniques can be performed on the cloned DNA to produce the PRO variant DNA.

[0151] Scanning amino acid analysis can also be employed to identify one or more amino acids along a contiguous sequence. Among the preferred scanning amino acids are relatively small, neutral amino acids. Such amino acids include alanine, glycine, serine, and cysteine. Alanine is typically a preferred scanning amino acid among this group because it eliminates the side-chain beyond the beta-carbon and is less likely to alter the main-chain conformation of the variant [Cunningham and Wells, Science, 244: 1081-1085 (1989)]. Alanine is also typically preferred because it is the most common amino acid. Further, it is frequently found in both buried and exposed positions [Creighton, The Proteins, (W.H. Freeman & Co., N.Y.); Chothia, J. Mol. Biol., 150:1 (1976)]. If alanine substitution does not yield adequate amounts of variant, an isoteric amino acid can be used.

[0152] C. Modifications of PRO

[0153] Covalent modifications of PRO are included within the scope of this invention. One type of covalent modification includes reacting targeted amino acid residues of a PRO polypeptide with an organic derivatizing agent that is capable of reacting with selected side chains or the N- or C-terminal residues of the PRO. Derivatization with bifunctional agents is useful, for instance, for crosslinking PRO to a water-insoluble support matrix or surface for use in the method for purifying anti-PRO antibodies, and vice-versa. Commonly used crosslinking agents include, e.g., 1,1-bis(diazoacetyl)-2-phenylethane, glutaraldehyde, N-hydroxysuccinimide esters, for example, esters with 4-azidosalicylic acid, homobifunctional imidoesters, including disuccinimidyl esters such as 3,3′-dithiobis(succinimidylpropionate), bifunctional maleimides such as bis-N-maleimido-1,8-octane and agents such as methyl-3-[(p-azidophenyl)dithio]propioimidate.

[0154] Other modifications include deamidation of glutaminyl and asparaginyl residues to the corresponding glutamyl and aspartyl residues, respectively, hydroxylation of proline and lysine, phosphorylation of hydroxyl groups of seryl or threonyl residues, methylation of the α-amino groups of lysine, arginine, and histidine side chains [T. E. Creighton, Proteins: Structure and Molecular Properties, W.H. Freeman & Co., San Francisco, pp. 79-86 (1983)], acetylation of the N-terminal amine, and amidation of any C-terminal carboxyl group.

[0155] Another type of covalent modification of the PRO polypeptide included within the scope of this invention comprises altering the native glycosylation pattern of the polypeptide. “Altering the native glycosylation pattern” is intended for purposes herein to mean deleting one or more carbohydrate moieties found in native sequence PRO (either by removing the underlying glycosylation site or by deleting the glycosylation by chemical and/or enzymatic means), and/or adding one or more glycosylation sites that are not present in the native sequence PRO. In addition, the phrase includes qualitative changes in the glycosylation of the native proteins, involving a change in the nature and proportions of the various carbohydrate moieties present.

[0156] Addition of glycosylation sites to the PRO polypeptide may be accomplished by altering the amino acid sequence. The alteration may be made, for example, by the addition of, or substitution by, one or more serine or threonine residues to the native sequence PRO (for O-linked glycosylation sites). The PRO amino acid sequence may optionally be altered through changes at the DNA level, particularly by mutating the DNA encoding the PRO polypeptide at preselected bases such that codons are generated that will translate into the desired amino acids.

[0157] Another means of increasing the number of carbohydrate moieties on the PRO polypeptide is by chemical or enzymatic coupling of glycosides to the polypeptide. Such methods are described in the art, e.g., in WO 87/05330 published 11 Sep. 1987, and in Aplin and Wriston, CRC Crit. Rev. Biochem., pp. 259-306 (1981).

[0158] Removal of carbohydrate moieties present on the PRO polypeptide may be accomplished chemically or enzymatically or by mutational substitution of codons encoding for amino acid residues that serve as targets for glycosylation. Chemical deglycosylation techniques are known in the art and described, for instance, by Hakimuddin, et al., Arch. Biochem. Biophys., 259:52 (1987) and by Edge et al., Anal. Biochem., 118:131 (1981). Enzymatic cleavage of carbohydrate moieties on polypeptides can be achieved by the use of a variety of endo- and exo-glycosidases as described by Thotakura et al., Meth. Enzymol., 138:350 (1987).

[0159] Another type of covalent modification of PRO comprises linking the PRO polypeptide to one of a variety of nonproteinaceous polymers, e.g., polyethylene glycol (PEG), polypropylene glycol, or polyoxyalkylenes, in the manner set forth in U.S. Pat. Nos. 4,640,835; 4,496,689; 4,301,144; 4,670,417; 4,791,192 or 4,179,337.

[0160] The PRO of the present invention may also be modified in a way to form a chimeric molecule comprising PRO fused to another, heterologous polypeptide or amino acid sequence.

[0161] In one embodiment, such a chimeric molecule comprises a fusion of the PRO with a tag polypeptide which provides an epitope to which an anti-tag antibody can selectively bind. The epitope tag is generally placed at the amino- or carboxyl-terminus of the PRO. The presence of such epitope-tagged forms of the PRO can be detected using an antibody against the tag polypeptide. Also, provision of the epitope tag enables the PRO to be readily purified by affinity purification using an anti-tag antibody or another type of affinity matrix that binds to the epitope tag. Various tag polypeptides and their respective antibodies are well known in the art. Examples include poly-histidine (poly-his) or poly-histidine-glycine (poly-his-gly) tags; the flu HA tag polypeptide and its antibody 12CA5. [Field et al., Mol. Cell. Biol., 8:2159-2165 (1988)]; the c-myc tag and the 8F9, 3C7, 6E10, G4, B7 and 9E10 antibodies thereto [Evan et al., Molecular and Cellular Biology, 5:3610-3616 (1985)]; and the Herpes Simplex virus glycoprotein D (gD) tag and its antibody [Paborsky et al., Protein Engineering, 2(6):547-553 (1990)]. Other tag polypeptides include the Flag-peptide [Hopp et al., BioTechnology, 6:1204-1210 (1988)]; the KT3 epitope peptide [Martin et al., Science, 255:192-194 (1992)]; an alpha-tubulin epitope peptide [Skinner et al., J. Biol. Chem., 266:15163-15166 (1991)]; and the T7 gene 10 protein peptide tag [Lutz-Freyermuth et al., Proc. Natl. Acad. Sci. USA, 87:6393-6397 (1990)].

[0162] In an alternative embodiment, the chimeric molecule may comprise a fusion of the PRO with an immunoglobulin or a particular region of an immunoglobulin. For a bivalent form of the chimeric molecule (also referred to as an “immunoadhesin”), such a fusion could be to the Fc region of an IgG molecule. The Ig fusions preferably include the substitution of a soluble (transmembrane domain deleted or inactivated) form of a PRO polypeptide in place of at least one variable region within an Ig molecule. In a particularly preferred embodiment, the immunoglobulin fusion includes the hinge, CH2 and CH3, or the hinge, CH1, CH2 and CH3 regions of an IgG1 molecule. For the production of immunoglobulin fusions see also U.S. Pat. No. 5,428,130 issued Jun. 27, 1995.

[0163] D. Preparation of PRO

[0164] The description below relates primarily to production of PRO by culturing cells transformed or transfected with a vector containing PRO nucleic acid. It is, of course, contemplated that alternative methods, which are well known in the art, may be employed to prepare PRO. For instance, the PRO sequence, or portions thereof, may be produced by direct peptide synthesis using solid-phase techniques [see, e.g., Stewart et al., Solid-Phase Peptide Synthesis, W.H. Freeman Co., San Francisco, Calif. (1969); Merrifield, J. Am. Chem. Soc., 85:2149-2154 (1963)]. In vitro protein synthesis may be performed using manual techniques or by automation. Automated synthesis may be accomplished, for instance, using an Applied Biosystems Peptide Synthesizer (Foster City, Calif.) using manufacturer's instructions. Various portions of the PRO may be chemically synthesized separately and combined using chemical or enzymatic methods to produce the full-length PRO.

[0165] 1. Isolation of DNA Encoding PRO

[0166] DNA encoding PRO may be obtained from a cDNA library prepared from tissue believed to possess the PRO mRNA and to express it at a detectable level. Accordingly, human PRO DNA can be conveniently obtained from a cDNA library prepared from human tissue, such as described in the Examples. The PRO-encoding gene may also be obtained from a genomic library or by known synthetic procedures (e.g., automated nucleic acid synthesis).

[0167] Libraries can be screened with probes (such as antibodies to the PRO or oligonucleotides of at least about 20-80 bases) designed to identify the gene of interest or the protein encoded by it. Screening the cDNA or genomic library with the selected probe may be conducted using standard procedures, such as described in Sambrook et al., Molecular Cloning: A Laboratory Manual (New York: Cold Spring Harbor Laboratory Press, 1989). An alternative means to isolate the gene encoding PRO is to use PCR methodology [Sambrook et al., supra; Dieffenbach et al., PCR Primer: A Laboratory Manual (Cold Spring Harbor Laboratory Press, 1995)].

[0168] The Examples below describe techniques for screening a cDNA library. The oligonucleotide sequences selected as probes should be of sufficient length and sufficiently unambiguous that false positives are minimized. The oligonucleotide is preferably labeled such that it can be detected upon hybridization to DNA in the library being screened. Methods of labeling are well known in the art, and include the use of radiolabels like ³²P-labeled ATP, biotinylation or enzyme labeling. Hybridization conditions, including moderate stringency and high stringency, are provided in Sambrook et al., supra.

[0169] Sequences identified in such library screening methods can be compared and aligned to other known sequences deposited and available in public databases such as GenBank or other private sequence databases. Sequence identity (at either the amino acid or nucleotide level) within defined regions of the molecule or across the full-length sequence can be determined using methods known in the art and as described herein.

[0170] Nucleic acid having protein coding sequence may be obtained by screening selected cDNA or genomic libraries using the deduced amino acid sequence disclosed herein for the first time, and, if necessary, using conventional primer extension procedures as described in Sambrook et al., supra, to detect precursors and processing intermediates of mRNA that may not have been reverse-transcribed into cDNA.

[0171] 2. Selection and Transformation of Host Cells

[0172] Host cells are transfected or transformed with expression or cloning vectors described herein for PRO production and cultured in conventional nutrient media modified as appropriate for inducing promoters, selecting transformants, or amplifying the genes encoding the desired sequences. The culture conditions, such as media, temperature, pH and the like, can be selected by the skilled artisan without undue experimentation. In general, principles, protocols, and practical techniques for maximizing the productivity of cell cultures can be found in Mammalian Cell Biotechnology: a Practical Approach, M. Butler, ed. (IRL Press, 1991) and Sambrook et al., supra.

[0173] Methods of eukaryotic cell transfection and prokaryotic cell transformation are known to the ordinarily skilled artisan, for example, CaCl₂, CaPO₄, liposome-mediated and electroporation. Depending on the host cell used, transformation is performed using standard techniques appropriate to such cells. The calcium treatment employing calcium chloride, as described in Sambrook et al., supra, or electroporation is generally used for prokaryotes. Infection with Agrobacterium tumefaciens is used for transformation of certain plant cells, as described by Shaw et al., Gene, 23:315 (1983) and WO 89/05859 published 29 Jun. 1989. For mammalian cells without such cell walls, the calcium phosphate precipitation method of Graham and van der Eb, Virology, 52:456-457 (1978) can be employed. General aspects of mammalian cell host system transfections have been described in U.S. Pat. No. 4,399,216. Transformations into yeast are typically carried out according to the method of Van Solingen et al., J. Bact., 130:946 (1977) and Hsiao et al., Proc. Natl. Acad. Sci. (USA), 76:3829 (1979). However, other methods for introducing DNA into cells, such as by nuclear microinjection, electroporation, bacterial protoplast fusion with intact cells, or polycations, e.g., polybrene, polyornithine, may also be used. For various techniques for transforming mammalian cells, see Keown et al., Methods in Enzymology, 185:527-537 (1990) and Mansour et al., Nature, 336:348-352 (1988).

[0174] Suitable host cells for cloning or expressing the DNA in the vectors herein include prokaryote, yeast, or higher eukaryote cells. Suitable prokaryotes include but are not limited to eubacteria, such as Gram-negative or Gram-positive organisms, for example, Enterobacteriaceae such as E. coli. Various E. coli strains are publicly available, such as E. coli K12 strain MM294 (ATCC 31,446); E. coli X1776 (ATCC 31,537); E. coli strain W3110 (ATCC 27,325) and K5 772 (ATCC 53,635). Other suitable prokaryotic host cells include Enterobacteriaceae such as Escherichia, e.g., E. coli, Enterobacter, Erwinia, Klebsiella, Proteus, Salmonella, e.g., Salmonella typhimurium, Serratia, e.g., Serratia marcescans, and Shigella, as well as Bacilli such as B. subtilis and B. licheniformis (e.g., B. licheniformis 41P disclosed in DD 266,710 published 12 Apr. 1989), Pseudomonas such as P. aeruginosa, and Streptomyces. These examples are illustrative rather than limiting. Strain W3110 is one particularly preferred host or parent host because it is a common host strain for recombinant DNA product fermentations. Preferably, the host cell secretes minimal amounts of proteolytic enzymes. For example, strain W3110 may be modified to effect a genetic mutation in the genes encoding proteins endogenous to the host, with examples of such hosts including E. coli W3110 strain 1A2, which has the complete genotype tonA; E. coli W3110 strain 9E4, which has the complete genotype tonA ptr3; E. coli W3110 strain 27C7 (ATCC 55,244), which has the complete genotype tonA ptr3 phoA E15 (argF-lac)169 degP ompT kan^{r}; E. coli W3110 strain 37D6, which has the complete genotype tonA ptr3 phoA E15 (argF-lac)169 degP ompT rbs7 ilvG kan^{r}; E. coli W3110 strain 40B4, which is strain 37D6 with a non-kanamycin resistant degP deletion mutation; and an E. coli strain having mutant periplasmic protease disclosed in U.S. Pat. No. 4,946,783 issued 7 Aug. 1990. Alternatively, in vitro methods of cloning, e.g., PCR or other nucleic acid polymerase reactions, are suitable.

[0175] In addition to prokaryotes, eukaryotic microbes such as filamentous fungi or yeast are suitable cloning or expression hosts for PRO-encoding vectors. Saccharomyces cerevisiae is a commonly used lower eukaryotic host microorganism. Others include Schizosaccharomyces pombe (Beach and Nurse, Nature, 290: 140 [1981]; EP 139,383 published 2 May 1985); Kluyveromyces hosts (U.S. Pat. No. 4,943,529; Fleer et al., Bio/Technology, 9:968-975 (1991)) such as, e.g., K. lactis (MW98-8C, CBS683, CBS4574; Louvencourt et al., J. Bacteriol., 154(2):737-742 [1983]), K. fragilis (ATCC 12,424), K. bulgaricus (ATCC 16,045), K. wickeramii (ATCC 24,178), K. waltii (ATCC 56,500), K. drosophilarum (ATCC 36,906; Van den Berg et al., Bio/Technology, 8:135 (1990)), K. thermotolerans, and K. marxianus; yarrowia (EP 402,226); Pichia pastoris (EP 183,070; Sreekrishna et al., J. Basic Microbiol., 28:265-278 [1988]); Candida; Trichoderma reesia (EP 244,234); Neurospora crassa (Case et al., Proc. Natl. Acad. Sci. USA, 76:5259-5263 [1979]); Schwanniomyces such as Schwanniomyces occidentalis (EP 394,538 published 31 Oct. 1990); and filamentous fungi such as, e.g., Neurospora, Penicillium, Tolypocladium (WO 91/00357 published 10 Jan. 1991), and Aspergillus hosts such as A. nidulans (Ballance et al., Biochem. Biophys. Res. Commun., 112:284-289 [1983]; Tilburn et al., Gene, 26:205-221 [1983]; Yelton et al., Proc. Natl. Acad. Sci. USA, 81: 1470-1474 [1984]) and A. niger (Kelly and Hynes, EMBO J., 4:475-479 [1985]). Methylotropic yeasts are suitable herein and include, but are not limited to, yeast capable of growth on methanol selected from the genera consisting of Hansenula, Candida, Kloeckera, Pichia, Saccharomyces, Torulopsis, and Rhodotorula. A list of specific species that are exemplary of this class of yeasts may be found in C. Anthony, The Biochemistry of Methylotrophs, 269 (1982).

[0176] Suitable host cells for the expression of glycosylated PRO are derived from multicellular organisms. Examples of invertebrate cells include insect cells such as Drosophila S2 and Spodoptera Sf9, as well as plant cells. Examples of useful mammalian host cell lines include Chinese hamster ovary (CHO) and COS cells. More specific examples include monkey kidney CV1 line transformed by SV40 (COS-7, ATCC CRL 1651); human embryonic kidney line (293 or 293 cells subcloned for growth in suspension culture, Graham et al., J. Gen Virol., 36:59 (1977)); Chinese hamster ovary cells/−DHFR (CHO, Urlaub and Chasin, Proc. Natl. Acad. Sci. USA, 77:4216 (1980)); mouse sertoli cells (TM4, Mather, Biol. Reprod., 23:243-251 (1980)); human lung cells (W138, ATCC CCL 75); human liver cells (Hep G2, HB 8065); and mouse mammary tumor (MMT 060562, ATCC CCL51). The selection of the appropriate host cell is deemed to be within the skill in the art.

[0177] 3. Selection and Use of a Replicable Vector

[0178] The nucleic acid (e.g., cDNA or genomic DNA) encoding PRO may be inserted into a replicable vector for cloning (amplification of the DNA) or for expression. Various vectors are publicly available. The vector may, for example, be in the form of a plasmid, cosmid, viral particle, or phage. The appropriate nucleic acid sequence may be inserted into the vector by a variety of procedures. In general, DNA is inserted into an appropriate restriction endonuclease site(s) using techniques known in the art. Vector components generally include, but are not limited to, one or more of a signal sequence, an origin of replication, one or more marker genes, an enhancer element, a promoter, and a transcription termination sequence. Construction of suitable vectors containing one or more of these components employs standard ligation techniques which are known to the skilled artisan.

[0179] The PRO may be produced recombinantly not only directly, but also as a fusion polypeptide with a heterologous polypeptide, which may be a signal sequence or other polypeptide having a specific cleavage site at the N-terminus of the mature protein or polypeptide. In general, the signal sequence may be a component of the vector, or it may be a part of the PRO-encoding DNA that is inserted into the vector. The signal sequence may be a prokaryotic signal sequence selected, for example, from the group of the alkaline phosphatase, penicillinase, lpp, or heat-stable enterotoxin II leaders. For yeast secretion the signal sequence may be, e.g., the yeast invertase leader, alpha factor leader (including Saccharomyces and Kluyveromyces α-factor leaders, the latter described in U.S. Pat. No. 5,010,182), or acid phosphatase leader, the C. albicans glucoamylase leader (EP 362,179 published 4 Apr. 1990), or the signal described in WO 90/13646 published 15 Nov. 1990. In mammalian cell expression, mammalian signal sequences may be used to direct secretion of the protein, such as signal sequences from secreted polypeptides of the same or related species, as well as viral secretory leaders.

[0180] Both expression and cloning vectors contain a nucleic acid sequence that enables the vector to replicate in one or more selected host cells. Such sequences are well known for a variety of bacteria, yeast, and viruses. The origin of replication from the plasmid pBR322 is suitable for most Gram-negative bacteria, the 2μ plasmid origin is suitable for yeast, and various viral origins (SV40, polyoma, adenovirus, VSV or BPV) are useful for cloning vectors in mammalian cells.

[0181] Expression and cloning vectors will typically contain a selection gene, also termed a selectable marker. Typical selection genes encode proteins that (a) confer resistance to antibiotics or other toxins, e.g., ampicillin, neomycin, methotrexate, or tetracycline, (b) complement auxotrophic deficiencies, or (c) supply critical nutrients not available from complex media, e.g., the gene encoding D-alanine racemase for Bacilli.

[0182] An example of suitable selectable markers for mammalian cells are those that enable the identification of cells competent to take up the PRO-encoding nucleic acid, such as DHFR or thymidine kinase. An appropriate host cell when wild-type DHFR is employed is the CHO cell line deficient in DHFR activity, prepared and propagated as described by Urlaub et al., Proc. Natl. Acad. Sci. USA, 77:4216 (1980). A suitable selection gene for use in yeast is the trp1 gene present in the yeast plasmid YRp7 [Stinchcomb et al., Nature, 282:39 (1979); Kingsman et al., Gene, 7:141 (1979); Tschemper et al., Gene, 10:157 (1980)]. The trp1 gene provides a selection marker for a mutant strain of yeast lacking the ability to grow in tryptophan, for example, ATCC No. 44076 or PEP4-1 [Jones, Genetics, 85:12 (1977)].

[0183] Expression and cloning vectors usually contain a promoter operably linked to the PRO-encoding nucleic acid sequence to direct mRNA synthesis. Promoters recognized by a variety of potential host cells are well known. Promoters suitable for use with prokaryotic hosts include the β-lactamase and lactose promoter systems [Chang et al., Nature, 275:615 (1978); Goeddel et al., Nature, 281:544 (1979)], alkaline phosphatase, a tryptophan (trp) promoter system [Goeddel, Nucleic Acids Res., 8:4057 (1980); EP 36,776], and hybrid promoters such as the tac promoter [deBoer et al., Proc. Natl. Acad. Sci. USA, 80:21-25 (1983)]. Promoters for use in bacterial systems also will contain a Shine-Dalgarno (S.D.) sequence operably linked to the DNA encoding PRO.

[0184] Examples of suitable promoting sequences for use with yeast hosts include the promoters for 3-phosphoglycerate kinase [Hitzeman et al., J. Biol. Chem., 255:2073 (1980)] or other glycolytic enzymes [Hess et al., J. Adv. Enzyme Reg., 7:149 (1968); Holland, Biochemistry, 17:4900 (1978)], such as enolase, glyceraldehyde-3-phosphate dehydrogenase, hexokinase, pyruvate decarboxylase, phosphofructokinase, glucose-6-phosphate isomerase, 3-phosphoglycerate mutase, pyruvate kinase, triosephosphate isomerase, phosphoglucose isomerase, and glucokinase.

[0185] Other yeast promoters, which are inducible promoters having the additional advantage of transcription controlled by growth conditions, are the promoter regions for alcohol dehydrogenase 2, isocytochrome C, acid phosphatase, degradative enzymes associated with nitrogen metabolism, metallothionein, glyceraldehyde-3-phosphate dehydrogenase, and enzymes responsible for maltose and galactose utilization. Suitable vectors and promoters for use in yeast expression are further described in EP 73,657.

[0186] PRO transcription from vectors in mammalian host cells is controlled, for example, by promoters obtained from the genomes of viruses such as polyoma virus, fowlpox virus (UK 2,211,504 published 5 Jul. 1989), adenovirus (such as Adenovirus 2), bovine papilloma virus, avian sarcoma virus, cytomegalovirus, a retrovirus, hepatitis-B virus and Simian Virus 40 (SV40), from heterologous mammalian promoters, e.g., the actin promoter or an immunoglobulin promoter, and from heat-shock promoters, provided such promoters are compatible with the host cell systems.

[0187] Transcription of a DNA encoding the PRO by higher eukaryotes may be increased by inserting an enhancer sequence into the vector. Enhancers are cis-acting elements of DNA, usually about from 10 to 300 bp, that act on a promoter to increase its transcription. Many enhancer sequences are now known from mammalian genes (globin, elastase, albumin, α-fetoprotein, and insulin). Typically, however, one will use an enhancer from a eukaryotic cell virus. Examples include the SV40 enhancer on the late side of the replication origin (bp 100-270), the cytomegalovirus early promoter enhancer, the polyoma enhancer on the late side of the replication origin, and adenovirus enhancers. The enhancer may be spliced into the vector at a position 5′ or 3′ to the PRO coding sequence, but is preferably located at a site 5′ from the promoter.

[0188] Expression vectors used in eukaryotic host cells (yeast, fungi, insect, plant, animal, human, or nucleated cells from other multicellular organisms) will also contain sequences necessary for the termination of transcription and for stabilizing the mRNA. Such sequences are commonly available from the 5′ and, occasionally 3′, untranslated regions of eukaryotic or viral DNAs or cDNAs. These regions contain nucleotide segments transcribed as polyadenylated fragments in the untranslated portion of the mRNA encoding PRO.

[0189] Still other methods, vectors, and host cells suitable for adaptation to the synthesis of PRO in recombinant vertebrate cell culture are described in Gething et al., Nature, 293:620-625 (1981); Mantei et al., Nature, 281:40-46 (1979); EP 117,060; and EP 117,058.

[0190] 4. Detecting Gene Amplification/Expression

[0191] Gene amplification and/or expression may be measured in a sample directly, for example, by conventional Southern blotting, Northern blotting to quantitate the transcription of mRNA [Thomas, Proc. Natl. Acad. Sci. USA, 77:5201-5205 (1980)], dot blotting (DNA analysis), or in situ hybridization, using an appropriately labeled probe, based on the sequences provided herein. Alternatively, antibodies may be employed that can recognize specific duplexes, including DNA duplexes, RNA duplexes, and DNA-RNA hybrid duplexes or DNA-protein duplexes. The antibodies in turn may be labeled and the assay may be carried out where the duplex is bound to a surface, so that upon the formation of duplex on the surface, the presence of antibody bound to the duplex can be detected.

[0192] Gene expression, alternatively, may be measured by immunological methods, such as immunohistochemical staining of cells or tissue sections and assay of cell culture or body fluids, to quantitate directly the expression of gene product. Antibodies useful for immunohistochemical staining and/or assay of sample fluids may be either monoclonal or polyclonal, and may be prepared in any mammal. Conveniently, the antibodies may be prepared against a native sequence PRO polypeptide or against a synthetic peptide based on the DNA sequences provided herein or against exogenous sequence fused to PRO DNA and encoding a specific antibody epitope.

[0193] 5. Purification of Polypeptide

[0194] Forms of PRO may be recovered from culture medium or from host cell lysates. If membrane-bound, it can be released from the membrane using a suitable detergent solution (e.g. Triton-X 100) or by enzymatic cleavage. Cells employed in expression of PRO can be disrupted by various physical or chemical means, such as freeze-thaw cycling, sonication, mechanical disruption, or cell lysing agents.

[0195] It may be desired to purify PRO from recombinant cell proteins or polypeptides. The following procedures are exemplary of suitable purification procedures: by fractionation on an ion-exchange column; ethanol precipitation; reverse phase HPLC; chromatography on silica or on a cation-exchange resin such as DEAE; chromatofocusing; SDS-PAGE; ammonium sulfate precipitation; gel filtration using, for example, Sephadex G-75; protein A Sepharose columns to remove contaminants such as IgG; and metal chelating columns to bind epitope-tagged forms of the PRO. Various methods of protein purification may be employed and such methods are known in the art and described for example in Deutscher, Methods in Enzymology, 182 (1990); Scopes, Protein Purification: Principles and Practice, Springer-Verlag, New York (1982). The purification step(s) selected will depend, for example, on the nature of the production process used and the particular PRO produced.

[0196] E. Tissue Distribution

[0197] The location of tissues expressing the PRO can be identified by determining mRNA expression in various human tissues. The location of such genes provides information about which tissues are most likely to be affected by the stimulating and inhibiting activities of the PRO polypeptides. The location of a gene in a specific tissue also provides sample tissue for the activity blocking assays discussed below.

[0198] As noted before, gene expression in various tissues may be measured by conventional Southern blotting, Northern blotting to quantitate the transcription of mRNA (Thomas, Proc. Natl. Acad. Sci. USA, 77:5201-5205 [1980]), dot blotting (DNA analysis), or in situ hybridization, using an appropriately labeled probe, based on the sequences provided herein. Alternatively, antibodies may be employed that can recognize specific duplexes, including DNA duplexes, RNA duplexes, and DNA-RNA hybrid duplexes or DNA-protein duplexes.

[0199] Gene expression in various tissues, alternatively, may be measured by immunological methods, such as immunohistochemical staining of tissue sections and assay of cell culture or body fluids, to quantitate directly the expression of gene product. Antibodies useful for immunohistochemical staining and/or assay of sample fluids may be either monoclonal or polyclonal, and may be prepared in any mammal. Conveniently, the antibodies may be prepared against a native sequence of a PRO polypeptide or against a synthetic peptide based on the DNA sequences encoding the PRO polypeptide or against an exogenous sequence fused to a DNA encoding a PRO polypeptide and encoding a specific antibody epitope. General techniques for generating antibodies, and special protocols for Northern blotting and in situ hybridization are provided below.

[0200] F. Antibody Binding Studies

[0201] The activity of the PRO polypeptides can be further verified by antibody binding studies, in which the ability of anti-PRO antibodies to inhibit the effect of the PRO polypeptides, respectively, on tissue cells is tested. Exemplary antibodies include polyclonal, monoclonal, humanized, bispecific, and heteroconjugate antibodies, the preparation of which will be described hereinbelow.

[0202] Antibody binding studies may be carried out in any known assay method, such as competitive binding assays, direct and indirect sandwich assays, and immunoprecipitation assays. Zola, Monoclonal Antibodies: A Manual of Techniques, pp. 147-158 (CRC Press, Inc., 1987).

[0203] Competitive binding assays rely on the ability of a labeled standard to compete with the test sample analyte for binding with a limited amount of antibody. The amount of target protein in the test sample is inversely proportional to the amount of standard that becomes bound to the antibodies. To facilitate determining the amount of standard that becomes bound, the antibodies preferably are insolubilized before or after the competition, so that the standard and analyte that are bound to the antibodies may conveniently be separated from the standard and analyte which remain unbound.

[0204] Sandwich assays involve the use of two antibodies, each capable of binding to a different immunogenic portion, or epitope, of the protein to be detected. In a sandwich assay, the test sample analyte is bound by a first antibody which is immobilized on a solid support, and thereafter a second antibody binds to the analyte, thus forming an insoluble three-part complex. See, e.g., U.S. Pat. No. 4,376,110. The second antibody may itself be labeled with a detectable moiety (direct sandwich assays) or may be measured using an anti-immunoglobulin antibody that is labeled with a detectable moiety (indirect sandwich assay). For example, one type of sandwich assay is an ELISA assay, in which case the detectable moiety is an enzyme.

[0205] For immunohistochemistry, the tissue sample may be fresh or frozen or may be embedded in paraffin and fixed with a preservative such as formalin, for example.

[0206] G. Cell-Based Assays

[0207] Cell-based assays and animal models for immune related diseases such as psoriasis can be used to further understand the relationship between the genes and polypeptides identified herein and the development and pathogenesis psoriasis.

[0208] In a different approach, cells of a cell type known to be involved in immune related disease are transfected with the cDNAs described herein, and the ability of these cDNAs to stimulate or inhibit immune related disease is analyzed. Suitable cells can be transfected with the desired gene, and monitored for such functional activity. Such transfected cell lines can then be used to test the ability of poly- or monoclonal antibodies or antibody compositions to inhibit or stimulate psoraisis. Cells transfected with the coding sequences of the genes identified herein can further be used to identify drug candidates for the treatment of immune related disease.

[0209] In addition, primary cultures derived from transgenic animals (as described below) can be used in the cell-based assays herein, although stable cell lines are preferred. Techniques to derive continuous cell lines from transgenic animals are well known in the art (see, e.g., Small et al., Mol. Cell. Biol. 5: 642-648 [1985]).

[0210] H. Animal Models

[0211] The results of cell based in vitro assays can be further verified using in vivo animal models and assays for immune related disease. A variety of well known animal models can be used to further understand the role of the genes identified herein in the development and pathogenesis of immune related disease, and to test the efficacy of candidate therapeutic agents, including antibodies, and other antagonists of the native polypeptides, including small molecule antagonists. The in vivo nature of such models makes them predictive of responses in human patients. Animal models of immune related diseases include both non-recombinant and recombinant (transgenic) animals. Non-recombinant animal models include, for example, rodent, e.g., murine models. Such models can be generated by introducing cells into syngeneic mice using standard techniques, e.g., subcutaneous injection, tail vein injection, spleen implantation, intraperitoneal implantation, implantation under the renal capsule, etc.

[0212] Graft-versus-host disease occurs when immunocompetent cells are transplanted into immunosuppressed or tolerant patients. The donor cells recognize and respond to host antigens. The response can vary from life threatening severe inflammation to mild cases of diarrhea and weight loss. Graft-versus-host disease models provide a means of assessing T cell reactivity against MHC antigens and minor transplant antigens. A suitable procedure is described in detail in Current Protocols in Immunology, above, unit 4.3.

[0213] An animal model for skin allograft rejection is a means of testing the ability of T cells to mediate in vivo tissue destruction and a measure of their role in transplant rejection. The most common and accepted models use murine tail-skin grafts. Repeated experiments have shown that skin allograft rejection is mediated by T cells, helper T cells and killer-effector T cells, and not antibodies. Auchincloss, H. Jr. and Sachs, D. H., Fundamental Immunology, 2nd ed., W. E. Paul ed., Raven Press, NY, 1989, 889-992. A suitable procedure is described in detail in Current Protocols in Immunology, above, unit 4.4. Other transplant rejection models which can be used to test the compounds of the invention are the allogeneic heart transplant models described by Tanabe, M. et al, Transplantation (1994) 58:23 and Tinubu, S. A. et al, J. Immunol. (1994) 4330-4338.

[0214] Contact hypersensitivity is a simple delayed type hypersensitivity in vivo assay of cell mediated immune function. In this procedure, cutaneous exposure to exogenous haptens which gives rise to a delayed type hypersensitivity reaction which is measured and quantitated. Contact sensitivity involves an initial sensitizing phase followed by an elicitation phase. The elicitation phase occurs when the T lymphocytes encounter an antigen to which they have had previous contact. Swelling and inflammation occur, making this an excellent model of human allergic contact dermatitis. A suitable procedure is described in detail in Current Protocols in Immunology, Eds. J. E. Cologan, A. M. Kruisbeek, D. H. Margulies, E. M. Shevach and W. Strober, John Wiley & Sons, Inc., 1994, unit 4.2. See also Grabbe, S, and Schwarz, T, Immun. Today 19 (1): 37-44 (1998).

[0215] Additionally, the compounds of the invention can be tested on animal models for immune related disease like psoriasis. Evidence suggests a T cell pathogenesis for psoriasis, therefore the compounds of the invention can be tested in the scid/scid mouse model described by Schon, M. P. et al, Nat. Med. (1997) 3:183, in which the mice demonstrate histopathologic skin lesions resembling psoriasis. Another suitable model is the human skin/scid mouse chimera prepared as described by Nickoloff, B. J. et al, Am. J. Path. (1995) 146:580.

[0216] Recombinant (transgenic) animal models can be engineered by introducing the coding portion of the genes identified herein into the genome of animals of interest, using standard techniques for producing transgenic animals. Animals that can serve as a target for transgenic manipulation include, without limitation, mice, rats, rabbits, guinea pigs, sheep, goats, pigs, and non-human primates, e.g., baboons, chimpanzees and monkeys. Techniques known in the art to introduce a transgene into such animals include pronucleic microinjection (Hoppe and Wanger, U.S. Pat. No. 4,873,191); retrovirus-mediated gene transfer into germ lines (e.g., Van der Putten et al., Proc. Natl. Acad. Sci. USA 82, 6148-615

[0217] ); gene targeting in embryonic stem cells (Thompson et al., Cell 56, 313-321 [1989]); electroporation of embryos (Lo, Mol. Cel. Biol. 3, 1803-1814 [1983]); sperm-mediated gene transfer (Lavitrano et al., Cell 57, 717-73 [1989]). For review, see, for example, U.S. Pat. No. 4,736,866.

[0218] For the purpose of the present invention, transgenic animals include those that carry the transgene only in part of their cells (“mosaic animals”). The transgene can be integrated either as a single transgene, or in concatamers, e.g., head-to-head or head-to-tail tandems. Selective introduction of a transgene into a particular cell type is also possible by following, for example, the technique of Lasko et al., Proc. Natl. Acad. Sci. USA 89, 6232-636 (1992).

[0219] The expression of the transgene in transgenic animals can be monitored by standard techniques. For example, Southern blot analysis or PCR amplification can be used to verify the integration of the transgene. The level of mRNA expression can then be analyzed using techniques such as in situ hybridization, Northern blot analysis, PCR, or immunocytochemistry.

[0220] The animals may be further examined for signs of immune disease pathology, for example by histological examination to determine infiltration of immune cells into specific tissues. Blocking experiments can also be performed in which the transgenic animals are treated with the compounds of the invention to determine the extent of the T cell proliferation stimulation or inhibition of the compounds. In these experiments, blocking antibodies which bind to the PRO polypeptide, prepared as described above, are administered to the animal and the effect on immune function is determined.

[0221] Alternatively, “knock out” animals can be constructed which have a defective or altered gene encoding a polypeptide identified herein, as a result of homologous recombination between the endogenous gene encoding the polypeptide and altered genomic DNA encoding the same polypeptide introduced into an embryonic cell of the animal. For example, cDNA encoding a particular polypeptide can be used to clone genomic DNA encoding that polypeptide in accordance with established techniques. A portion of the genomic DNA encoding a particular polypeptide can be deleted or replaced with another gene, such as a gene encoding a selectable marker which can be used to monitor integration. Typically, several kilobases of unaltered flanking DNA (both at the 5′ and 3′ ends) are included in the vector [see e.g., Thomas and Capecchi, Cell, 51:503 (1987) for a description of homologous recombination vectors]. The vector is introduced into an embryonic stem cell line (e.g., by electroporation) and cells in which the introduced DNA has homologously recombined with the endogenous DNA are selected [see e.g., Li et al., Cell, 69:915 (1992)]. The selected cells are then injected into a blastocyst of an animal (e.g., a mouse or rat) to form aggregation chimeras [see e.g., Bradley, in Teratocarcinomas and Embryonic Stem Cells: A Practical Approach, E. J. Robertson, ed. (IRL, Oxford, 1987), pp. 113-152]. A chimeric embryo can then be implanted into a suitable pseudopregnant female foster animal and the embryo brought to term to create a “knock out” animal. Progeny harboring the homologously recombined DNA in their germ cells can be identified by standard techniques and used to breed animals in which all cells of the animal contain the homologously recombined DNA. Knockout animals can be characterized for instance, for their ability to defend against certain pathological conditions and for their development of pathological conditions due to absence of the polypeptide.

[0222] I. Immunoadjuvant Therapy

[0223] In one embodiment, the immunostimulating compounds of the invention can be used in immunoadjuvant therapy for the treatment of tumors (cancer). It is now well established that T cells recognize human tumor specific antigens. One group of tumor antigens, encoded by the MAGE, BAGE and GAGE families of genes, are silent in all adult normal tissues, but are expressed in significant amounts in tumors, such as melanomas, lung tumors, head and neck tumors, and bladder carcinomas. DeSmet, C. et al., (1996) Proc. Natl. Acad. Sci. USA, 93:7149. It has been shown that costimulation of T cells induces tumor regression and an antitumor response both in vitro and in vivo. Melero, I. et al., Nature Medicine (1997) 3:682; Kwon, E. D. et al., Proc. Natl. Acad. Sci. USA (1997) 94: 8099; Lynch, D. H. et al, Nature Medicine (1997) 3:625; Finn, O. J. and Lotze, M. T., J. Immunol. (1998) 21:114. The stimulatory compounds of the invention can be administered as adjuvants, alone or together with a growth regulating agent, cytotoxic agent or chemotherapeutic agent, to stimulate T cell proliferation/activation and an antitumor response to tumor antigens. The growth regulating, cytotoxic, or chemotherapeutic agent may be administered in conventional amounts using known administration regimes. Immunostimulating activity by the compounds of the invention allows reduced amounts of the growth regulating, cytotoxic, or chemotherapeutic agents thereby potentially lowering the toxicity to the patient.

[0224] J. Screening Assays for Drug Candidates

[0225] Screening assays for drug candidates are designed to identify compounds that bind to or complex with the polypeptides encoded by the genes identified herein or a biologically active fragment thereof, or otherwise interfere with the interaction of the encoded polypeptides with other cellular proteins. Such screening assays will include assays amenable to high-throughput screening of chemical libraries, making them particularly suitable for identifying small molecule drug candidates. Small molecules contemplated include synthetic organic or inorganic compounds, including peptides, preferably soluble peptides, (poly)peptide-immunoglobulin fusions, and, in particular, antibodies including, without limitation, poly- and monoclonal antibodies and antibody fragments, single-chain antibodies, anti-idiotypic antibodies, and chimeric or humanized versions of such antibodies or fragments, as well as human antibodies and antibody fragments. The assays can be performed in a variety of formats, including protein-protein binding assays, biochemical screening assays, immunoassays and cell based assays, which are well characterized in the art. All assays are common in that they call for contacting the drug candidate with a polypeptide encoded by a nucleic acid identified herein under conditions and for a time sufficient to allow these two components to interact.

[0226] In binding assays, the interaction is binding and the complex formed can be isolated or detected in the reaction mixture. In a particular embodiment, the polypeptide encoded by the gene identified herein or the drug candidate is immobilized on a solid phase, e.g., on a microtiter plate, by covalent or non-covalent attachments. Non-covalent attachment generally is accomplished by coating the solid surface with a solution of the polypeptide and drying. Alternatively, an immobilized antibody, e.g., a monoclonal antibody, specific for the polypeptide to be immobilized can be used to anchor it to a solid surface. The assay is performed by adding the non-immobilized component, which may be labeled by a detectable label, to the immobilized component, e.g., the coated surface containing the anchored component. When the reaction is complete, the non-reacted components are removed, e.g., by washing, and complexes anchored on the solid surface are detected. When the originally non-immobilized component carries a detectable label, the detection of label immobilized on the surface indicates that complexing occurred. Where the originally non-immobilized component does not carry a label, complexing can be detected, for example, by using a labelled antibody specifically binding the immobilized complex.

[0227] If the candidate compound interacts with but does not bind to a particular protein encoded by a gene identified herein, its interaction with that protein can be assayed by methods well known for detecting protein-protein interactions. Such assays include traditional approaches, such as, cross-linking, co-immunoprecipitation, and co-purification through gradients or chromatographic columns. In addition, protein-protein interactions can be monitored by using a yeast-based genetic system described by Fields and co-workers [Fields and Song, Nature (London) 340, 245-246 (1989); Chien et al., Proc. Natl. Acad. Sci. USA 88, 9578-9582 (1991)] as disclosed by Chevray and Nathans, Proc. Natl. Acad. Sci. USA 89, 5789-5793 (1991). Many transcriptional activators, such as yeast GAL4, consist of two physically discrete modular domains, one acting as the DNA-binding domain, while the other one functioning as the transcription activation domain. The yeast expression system described in the foregoing publications (generally referred to as the “two-hybrid system”) takes advantage of this property, and employs two hybrid proteins, one in which the target protein is fused to the DNA-binding domain of GAL4, and another, in which candidate activating proteins are fused to the activation domain. The expression of a GAL1-lacZ reporter gene under control of a GAL4-activated promoter depends on reconstitution of GAL4 activity via protein-protein interaction. Colonies containing interacting polypeptides are detected with a chromogenic substrate for β-galactosidase. A complete kit (MATCHMAKER™) for identifying protein-protein interactions between two specific proteins using the two-hybrid technique is commercially available from Clontech. This system can also be extended to map protein domains involved in specific protein interactions as well as to pinpoint amino acid residues that are crucial for these interactions.

[0228] In order to find compounds that interfere with the interaction of a gene identified herein and other intra- or extracellular components can be tested, a reaction mixture is usually prepared containing the product of the gene and the intra- or extracellular component under conditions and for a time allowing for the interaction and binding of the two products. To test the ability of a test compound to inhibit binding, the reaction is run in the absence and in the presence of the test compound. In addition, a placebo may be added to a third reaction mixture, to serve as positive control. The binding (complex formation) between the test compound and the intra- or extracellular component present in the mixture is monitored as described above. The formation of a complex in the control reaction(s) but not in the reaction mixture containing the test compound indicates that the test compound interferes with the interaction of the test compound and its reaction partner.

[0229] K. Compositions and Methods for Treatment

[0230] The compositions useful in the treatment of immune related disease include, without limitation, proteins, antibodies, small organic molecules, peptides, phosphopeptides, antisense and ribozyme molecules, triple helix molecules, etc. that inhibit immune function, for example, T cell proliferation/activation, lymphokine release, or immune cell infiltration.

[0231] For example, antisense RNA and RNA molecules act to directly block the translation of mRNA by hybridizing to targeted mRNA and preventing protein translation. When antisense DNA is used, oligodeoxyribonucleotides derived from the translation initiation site, e.g., between about −10 and +10 positions of the target gene nucleotide sequence, are preferred.

[0232] Ribozymes are enzymatic RNA molecules capable of catalyzing the specific cleavage of RNA. Ribozymes act by sequence-specific hybridization to the complementary target RNA, followed by endonucleolytic cleavage. Specific ribozyme cleavage sites within a potential RNA target can be identified by known techniques. For further details see, e.g., Rossi, Current Biology 4, 469-471 (1994), and PCT publication No. WO 97/33551 (published Sep. 18, 1997).

[0233] Nucleic acid molecules in triple helix formation used to inhibit transcription should be single-stranded and composed of deoxynucleotides. The base composition of these oligonucleotides is designed such that it promotes triple helix formation via Hoogsteen base pairing rules, which generally require sizeable stretches of purines or pyrimidines on one strand of a duplex. For further details see, e.g., PCT publication No. WO 97/33551, supra.

[0234] These molecules can be identified by any or any combination of the screening assays discussed above and/or by any other screening techniques well known for those skilled in the art.

[0235] L. Anti-PRO Antibodies

[0236] The present invention further provides anti-PRO antibodies. Exemplary antibodies include polyclonal, monoclonal, humanized, bispecific, and heteroconjugate antibodies.

[0237] 1. Polyclonal Antibodies

[0238] The anti-PRO antibodies may comprise polyclonal antibodies. Methods of preparing polyclonal antibodies are known to the skilled artisan. Polyclonal antibodies can be raised in a mammal, for example, by one or more injections of an immunizing agent and, if desired, an adjuvant. Typically, the immunizing agent and/or adjuvant will be injected in the mammal by multiple subcutaneous or intraperitoneal injections. The immunizing agent may include the PRO polypeptide or a fusion protein thereof. It may be useful to conjugate the immunizing agent to a protein known to be immunogenic in the mammal being immunized. Examples of such immunogenic proteins include but are not limited to keyhole limpet hemocyanin, serum albumin, bovine thyroglobulin, and soybean trypsin inhibitor. Examples of adjuvants which may be employed include Freund's complete adjuvant and MPL-TDM adjuvant (monophosphoryl Lipid A, synthetic trehalose dicorynomycolate). The immunization protocol may be selected by one skilled in the art without undue experimentation.

[0239] 2. Monoclonal Antibodies

[0240] The anti-PRO antibodies may, alternatively, be monoclonal antibodies. Monoclonal antibodies may be prepared using hybridoma methods, such as those described by Kohler and Milstein, Nature, 256:495 (1975). In a hybridoma method, a mouse, hamster, or other appropriate host animal, is typically immunized with an immunizing agent to elicit lymphocytes that produce or are capable of producing antibodies that will specifically bind to the immunizing agent. Alternatively, the lymphocytes may be immunized in vitro.

[0241] The immunizing agent will typically include the PRO polypeptide or a fusion protein thereof. Generally, either peripheral blood lymphocytes (“PBLs”) are used if cells of human origin are desired, or spleen cells or lymph node cells are used if non-human mammalian sources are desired. The lymphocytes are then fused with an immortalized cell line using a suitable fusing agent, such as polyethylene glycol, to form a hybridoma cell [Goding, Monoclonal Antibodies: Principles and Practice, Academic Press, (1986) pp. 59-103]. Immortalized cell lines are usually transformed mammalian cells, particularly myeloma cells of rodent, bovine and human origin. Usually, rat or mouse myeloma cell lines are employed. The hybridoma cells may be cultured in a suitable culture medium that preferably contains one or more substances that inhibit the growth or survival of the unfused, immortalized cells. For example, if the parental cells lack the enzyme hypoxanthine guanine phosphoribosyl transferase (HGPRT or HPRT), the culture medium for the hybridomas typically will include hypoxanthine, aminopterin, and thymidine (“HAT medium”), which substances prevent the growth of HGPRT-deficient cells.

[0242] Preferred immortalized cell lines are those that fuse efficiently, support stable high level expression of antibody by the selected antibody-producing cells, and are sensitive to a medium such as HAT medium. More preferred immortalized cell lines are murine myeloma lines, which can be obtained, for instance, from the Salk Institute Cell Distribution Center, San Diego, Calif. and the American Type Culture Collection, Manassas, Va. Human myeloma and mouse-human heteromyeloma cell lines also have been described for the production of human monoclonal antibodies [Kozbor, J. Immunol., 133:3001 (1984); Brodeur et al., Monoclonal Antibody Production Techniques and Applications, Marcel Dekker, Inc., New York, (1987) pp. 51-63].

[0243] The culture medium in which the hybridoma cells are cultured can then be assayed for the presence of monoclonal antibodies directed against PRO. Preferably, the binding specificity of monoclonal antibodies produced by the hybridoma cells is determined by immunoprecipitation or by an in vitro binding assay, such as radioimmunoassay (RIA) or enzyme-linked immunoabsorbent assay (ELISA). Such techniques and assays are known in the art. The binding affinity of the monoclonal antibody can, for example, be determined by the Scatchard analysis of Munson and Pollard, Anal. Biochem., 107:220 (1980).

[0244] After the desired hybridoma cells are identified, the clones may be subcloned by limiting dilution procedures and grown by standard methods [Goding, supra]. Suitable culture media for this purpose include, for example, Dulbecco's Modified Eagle's Medium and RPMI-1640 medium. Alternatively, the hybridoma cells may be grown in vivo as ascites in a mammal.

[0245] The monoclonal antibodies secreted by the subclones may be isolated or purified from the culture medium or ascites fluid by conventional immunoglobulin purification procedures such as, for example, protein A-Sepharose, hydroxylapatite chromatography, gel electrophoresis, dialysis, or affinity chromatography.

[0246] The monoclonal antibodies may also be made by recombinant DNA methods, such as those described in U.S. Pat. No. 4,816,567. DNA encoding the monoclonal antibodies of the invention can be readily isolated and sequenced using conventional procedures (e.g., by using oligonucleotide probes that are capable of binding specifically to genes encoding the heavy and light chains of murine antibodies). The hybridoma cells of the invention serve as a preferred source of such DNA. Once isolated, the DNA may be placed into expression vectors, which are then transfected into host cells such as simian COS cells, Chinese hamster ovary (CHO) cells, or myeloma cells that do not otherwise produce immunoglobulin protein, to obtain the synthesis of monoclonal antibodies in the recombinant host cells. The DNA also may be modified, for example, by substituting the coding sequence for human heavy and light chain constant domains in place of the homologous murine sequences [U.S. Pat. No. 4,816,567; Morrison et al., supra] or by covalently joining to the immunoglobulin coding sequence all or part of the coding sequence for a non-immunoglobulin polypeptide. Such a non-immunoglobulin polypeptide can be substituted for the constant domains of an antibody of the invention, or can be substituted for the variable domains of one antigen-combining site of an antibody of the invention to create a chimeric bivalent antibody.

[0247] The antibodies may be monovalent antibodies. Methods for preparing monovalent antibodies are well known in the art. For example, one method involves recombinant expression of immunoglobulin light chain and modified heavy chain. The heavy chain is truncated generally at any point in the Fc region so as to prevent heavy chain crosslinking. Alternatively, the relevant cysteine residues are substituted with another amino acid residue or are deleted so as to prevent crosslinking.

[0248] In vitro methods are also suitable for preparing monovalent antibodies. Digestion of antibodies to produce fragments thereof, particularly, Fab fragments, can be accomplished using routine techniques known in the art.

[0249] 3. Human and Humanized Antibodies

[0250] The anti-PRO antibodies of the invention may further comprise humanized antibodies or human antibodies. Humanized forms of non-human (e.g., murine) antibodies are chimeric immunoglobulins, immunoglobulin chains or fragments thereof (such as Fv, Fab, Fab′, F(ab′)₂ or other antigen-binding subsequences of antibodies) which contain minimal sequence derived from non-human immunoglobulin. Humanized antibodies include human immunoglobulins (recipient antibody) in which residues from a complementary determining region (CDR) of the recipient are replaced by residues from a CDR of a non-human species (donor antibody) such as mouse, rat or rabbit having the desired specificity, affinity and capacity. In some instances, Fv framework residues of the human immunoglobulin are replaced by corresponding non-human residues. Humanized antibodies may also comprise residues which are found neither in the recipient antibody nor in the imported CDR or framework sequences. In general, the humanized antibody will comprise substantially all of at least one, and typically two, variable domains, in which all or substantially all of the CDR regions correspond to those of a non-human immunoglobulin and all or substantially all of the FR regions are those of a human immunoglobulin consensus sequence. The humanized antibody optimally also will comprise at least a portion of an immunoglobulin constant region (Fc), typically that of a human immunoglobulin [Jones et al., Nature, 321:522-525 (1986); Riechmann et al., Nature, 332:323-329 (1988); and Presta, Curr. Op. Struct. Biol., 2:593-596 (1992)].

[0251] Methods for humanizing non-human antibodies are well known in the art. Generally, a humanized antibody has one or more amino acid residues introduced into it from a source which is non-human. These non-human amino acid residues are often referred to as “import” residues, which are typically taken from an “import” variable domain. Humanization can be essentially performed following the method of Winter and co-workers [Jones et al., Nature, 321:522-525 (1986); Riechmann et al., Nature, 332:323-327 (1988); Verhoeyen et al., Science, 239:1534-1536 (1988)], by substituting rodent CDRs or CDR sequences for the corresponding sequences of a human antibody. Accordingly, such “humanized” antibodies are chimeric antibodies (U.S. Pat. No. 4,816,567), wherein substantially less than an intact human variable domain has been substituted by the corresponding sequence from a non-human species. In practice, humanized antibodies are typically human antibodies in which some CDR residues and possibly some FR residues are substituted by residues from analogous sites in rodent antibodies.

[0252] Human antibodies can also be produced using various techniques known in the art, including phage display libraries [Hoogenboom and Winter, J. Mol. Biol., 227:381 (1991); Marks et al., J. Mol. Biol., 222:581 (1991)]. The techniques of Cole et al. and Boerner et al. are also available for the preparation of human monoclonal antibodies (Cole et al., Monoclonal Antibodies and Cancer Therapy, Alan R. Liss, p. 77 (1985) and Boerner et al., J. Immunol., 147 (1):86-95 (1991)]. Similarly, human antibodies can be made by introducing of human immunoglobulin loci into transgenic animals, e.g., nice in which the endogenous immunoglobulin genes have been partially or completely inactivated. Upon challenge, human antibody production is observed, which closely resembles that seen in humans in all respects, including gene rearrangement, assembly, and antibody repertoire. This approach is described, for example, in U.S. Pat. Nos. 5,545,807; 5,545,806; 5,569,825; 5,625,126; 5,633,425; 5,661,016, and in the following scientific publications: Marks et al., Bio/Technology 10, 779-783 (1992); Lonberg et al., Nature 368 856-859 (1994); Morrison, Nature 368, 812-13 (1994); Fishwild et al., Nature Biotechnology 14, 845-51 (1996); Neuberger, Nature Biotechnology 14, 826 (1996); Lonberg and Huszar, Intern. Rev. Immunol. 13 65-93 (1995).

[0253] The antibodies may also be affinity matured using known selection and/or mutagenesis methods as described above. Preferred affinity matured antibodies have an affinity which is five times, more preferably 10 times, even more preferably 20 or 30 times greater than the starting antibody (generally murine, humanized or human) from which the matured antibody is prepared.

[0254] 4. Bispecific Antibodies

[0255] Bispecific antibodies are monoclonal, preferably human or humanized, antibodies that have binding specificities for at least two different antigens. In the present case, one of the binding specificities is for the PRO, the other one is for any other antigen, and preferably for a cell-surface protein or receptor or receptor subunit.

[0256] Methods for making bispecific antibodies are known in the art. Traditionally, the recombinant production of bispecific antibodies is based on the co-expression of two immunoglobulin heavy-chain/light-chain pairs, where the two heavy chains have different specificities [Milstein and Cuello, Nature, 305:537-539 (1983)]. Because of the random assortment of immunoglobulin heavy and light chains, these hybridomas (quadromas) produce a potential mixture of ten different antibody molecules, of which only one has the correct bispecific structure. The purification of the correct molecule is usually accomplished by affinity chromatography steps. Similar procedures are disclosed in WO 93/08829, published 13 May 1993, and in Traunecker et al., EMBO J., 10:3655-3659 (1991).

[0257] Antibody variable domains with the desired binding specificities (antibody-antigen combining sites) can be fused to immunoglobulin constant domain sequences. The fusion preferably is with an immunoglobulin heavy-chain constant domain, comprising at least part of the hinge, CH2, and CH3 regions. It is preferred to have the first heavy-chain constant region (CH1) containing the site necessary for light-chain binding present in at least one of the fusions. DNAs encoding the immunoglobulin heavy-chain fusions and, if desired, the immunoglobulin light chain, are inserted into separate expression vectors, and are co-transfected into a suitable host organism. For further details of generating bispecific antibodies see, for example, Suresh et al., Methods in Enzymology, 121:210 (1986).

[0258] According to another approach described in WO 96/27011, the interface between a pair of antibody molecules can be engineered to maximize the percentage of heterodimers which are recovered from recombinant cell culture. The preferred interface comprises at least a part of the CH3 region of an antibody constant domain. In this method, one or more small amino acid side chains from the interface of the first antibody molecule are replaced with larger side chains (e.g. tyrosine or tryptophan). Compensatory “cavities” of identical or similar size to the large side chain(s) are created on the interface of the second antibody molecule by replacing large amino acid side chains with smaller ones (e.g. alanine or threonine). This provides a mechanism for increasing the yield of the heterodimer over other unwanted end-products such as homodimers.

[0259] Bispecific antibodies can be prepared as full length antibodies or antibody fragments (e.g. F(ab′)₂ bispecific antibodies). Techniques for generating bispecific antibodies from antibody fragments have been described in the literature. For example, bispecific antibodies can be prepared can be prepared using chemical linkage. Brennan et al., Science 229:81 (1985) describe a procedure wherein intact antibodies are proteolytically cleaved to generate F(ab′)₂ fragments. These fragments are reduced in the presence of the dithiol complexing agent sodium arsenite to stabilize vicinal dithiols and prevent intermolecular disulfide formation. The Fab′ fragments generated are then converted to thionitrobenzoate (TNB) derivatives. One of the Fab′-TNB derivatives is then reconverted to the Fab′-thiol by reduction with mercaptoethylamine and is mixed with an equimolar amount of the other Fab′-TNB derivative to form the bispecific antibody. The bispecific antibodies produced can be used as agents for the selective immobilization of enzymes.

[0260] Fab′ fragments may be directly recovered from E. coli and chemically coupled to form bispecific antibodies. Shalaby et al., J. Exp. Med. 175:217-225 (1992) describe the production of a fully humanized bispecific antibody F(ab′)₂ molecule. Each Fab′ fragment was separately secreted from E. coli and subjected to directed chemical coupling in vitro to form the bispecific antibody. The bispecific antibody thus formed was able to bind to cells overexpressing the ErbB2 receptor and normal human T cells, as well as trigger the lytic activity of human cytotoxic lymphocytes against human breast tumor targets.

[0261] Various technique for making and isolating bispecific antibody fragments directly from recombinant cell culture have also been described. For example, bispecific antibodies have been produced using leucine zippers. Kostelny et al., J. Immunol. 148 (5):1547-1553 (1992). The leucine zipper peptides from the Fos and Jun proteins were linked to the Fab′ portions of two different antibodies by gene fusion. The antibody homodimers were reduced at the hinge region to form monomers and then re-oxidized to form the antibody heterodimers. This method can also be utilized for the production of antibody homodimers. The “diabody” technology described by Hollinger et al., Proc. Natl. Acad. Sci. USA 90:6444-6448 (1993) has provided an alternative mechanism for making bispecific antibody fragments. The fragments comprise a heavy-chain variable domain (V_{H}) connected to a light-chain variable domain (V_{L}) by a linker which is too short to allow pairing between the two domains on the same chain. Accordingly, the V_{H} and V_{L} domains of one fragment are forced to pair with the complementary V_{L} and V_{H} domains of another fragment, thereby forming two antigen-binding sites. Another strategy for making bispecific antibody fragments by the use of single-chain Fv (sFv) dimers has also been reported. See, Gruber et al., J. Immunol. 152:5368 (1994). Antibodies with more than two valencies are contemplated. For example, trispecific antibodies can be prepared. Tutt et al., J. Immunol. 147:60 (1991).

[0262] Exemplary bispecific antibodies may bind to two different epitopes on a given PRO polypeptide herein. Alternatively, an anti-PRO polypeptide arm may be combined with an arm which binds to a triggering molecule on a leukocyte such as a T-cell receptor molecule (e.g. CD2, CD3, CD28, or B7), or Fc receptors for IgG (FcγR), such as FcγRI (CD64), FcγRII (CD32) and FcγRIII (CD16) so as to focus cellular defense mechanisms to the cell expressing the particular PRO polypeptide. Bispecific antibodies may also be used to localize cytotoxic agents to cells which express a particular PRO polypeptide. These antibodies possess a PRO-binding arm and an arm which binds a cytotoxic agent or a radionuclide chelator, such as EOTUBE, DPTA, DOTA, or TETA. Another bispecific antibody of interest binds the PRO polypeptide and further binds tissue factor (TF).

[0263] 5. Heteroconjugate Antibodies

[0264] Heteroconjugate antibodies are also within the scope of the present invention. Heteroconjugate antibodies are composed of two covalently joined antibodies. Such antibodies have, for example, been proposed to target immune system cells to unwanted cells [U.S. Pat. No. 4,676,980], and for treatment of HIV infection [WO 91/00360; WO 92/200373; EP 03089]. It is contemplated that the antibodies may be prepared in vitro using known methods in synthetic protein chemistry, including those involving crosslinking agents. For example, immunotoxins may be constructed using a disulfide exchange reaction or by forming a thioether bond. Examples of suitable reagents for this purpose include iminothiolate and methyl-4-mercaptobutyrimidate and those disclosed, for example, in U.S. Pat. No. 4,676,980.

[0265] 6. Effector Function Engineering

[0266] It may be desirable to modify the antibody of the invention with respect to effector function, so as to enhance, e.g., the effectiveness of the antibody in treating cancer. For example, cysteine residue(s) may be introduced into the Fc region, thereby allowing interchain disulfide bond formation in this region. The homodimeric antibody thus generated may have improved internalization capability and/or increased complement-mediated cell killing and antibody-dependent cellular cytotoxicity (ADCC). See Caron et al., J. Exp Med., 176: 1191-1195 (1992) and Shopes, J. Immunol., 148: 2918-2922 (1992). Homodimeric antibodies with enhanced anti-tumor activity may also be prepared using heterobifunctional cross-linkers as described in Wolff et al. Cancer Research, 53: 2560-2565 (1993). Alternatively, an antibody can be engineered that has dual Fc regions and may thereby have enhanced complement lysis and ADCC capabilities. See Stevenson et al., Anti-Cancer Drug Design, 3: 219-230 (1989).

[0267] 7. Immunoconjugates

[0268] The invention also pertains to immunoconjugates comprising an antibody conjugated to a cytotoxic agent such as a chemotherapeutic agent, toxin (e.g., an enzymatically active toxin of bacterial, fungal, plant, or animal origin, or fragments thereof), or a radioactive isotope (i.e., a radioconjugate).

[0269] Chemotherapeutic agents useful in the generation of such immunoconjugates have been described above. Enzymatically active toxins and fragments thereof that can be used include diphtheria A chain, nonbinding active fragments of diphtheria toxin, exotoxin A chain (from Pseudomonas aeruginosa), ricin A chain, abrin A chain, modeccin A chain, alpha-sarcin, Aleurites fordii proteins, dianthin proteins, Phytolaca americana proteins (PAPI, PAPII, and PAP-S), momordica charantia inhibitor, curcin, crotin, sapaonaria officinalis inhibitor, gelonin, mitogellin, restrictocin, phenomycin, enomycin, and the tricothecenes. A variety of radionuclides are available for the production of radioconjugated antibodies. Examples include ²¹²Bi, ¹³¹I, ¹³¹In, ⁹⁰Y, and ¹⁸⁶Re.

[0270] Conjugates of the antibody and cytotoxic agent are made using a variety of bifunctional protein-coupling agents such as N-succinimidyl-3-(2-pyridyldithiol) propionate (SPDP), iminothiolane (IT), bifunctional derivatives of imidoesters (such as dimethyl adipimidate HCL), active esters (such as disuccinimidyl suberate), aldehydes (such as glutareldehyde), bis-azido compounds (such as bis-(p-azidobenzoyl) hexanediamine), bis-diazonium derivatives (such as bis-(p-diazoniumbenzoyl)-ethylenediamine), diisocyanates (such as tolyene 2,6-diisocyanate), and bis-active fluorine compounds (such as 1,5-difluoro-2,4-dinitrobenzene). For example, a ricin immunotoxin can be prepared as described in Vitetta et al., Science, 238: 1098 (1987). Carbon-14-labeled 1-isothiocyanatobenzyl-3-methyldiethylene triaminepentaacetic acid (MX-DTPA) is an exemplary chelating agent for conjugation of radionucleotide to the antibody. See WO94/11026.

[0271] In another embodiment, the antibody may be conjugated to a “receptor” (such streptavidin) for utilization in tumor pretargeting wherein the antibody-receptor conjugate is administered to the patient, followed by removal of unbound conjugate from the circulation using a clearing agent and then administration of a “ligand” (e.g., avidin) that is conjugated to a cytotoxic agent (e.g., a radionucleotide).

[0272] 8. Immunoliposomes

[0273] The antibodies disclosed herein may also be formulated as immunoliposomes. Liposomes containing the antibody are prepared by methods known in the art, such as described in Epstein et al., Proc. Natl. Acad. Sci. USA, 82: 3688 (1985); Hwang et al., Proc. Natl. Acad. Sci. USA, 77: 4030 (1980); and U.S. Pat. Nos. 4,485,045 and 4,544,545. Liposomes with enhanced circulation time are disclosed in U.S. Pat. No. 5,013,556.

[0274] Particularly useful liposomes can be generated by the reverse-phase evaporation method with a lipid composition comprising phosphatidylcholine, cholesterol, and PEG-derivatized phosphatidylethanolamine (PEG-PE). Liposomes are extruded through filters of defined pore size to yield liposomes with the desired diameter. Fab′ fragments of the antibody of the present invention can be conjugated to the liposomes as described in Martin et al., J. Biol. Chem., 257: 286-288 (1982) via a disulfide-interchange reaction. A chemotherapeutic agent (such as Doxorubicin) is optionally contained within the liposome. See Gabizon et al., J. National Cancer Inst., 81(19): 1484 (1989).

[0275] M. Pharmaceutical Compositions

[0276] The active PRO molecules of the invention (e.g., PRO polypeptides, anti-PRO antibodies, and/or variants of each) as well as other molecules identified by the screening assays disclosed above, can be administered for the treatment of immune related disease, in the form of pharmaceutical compositions.

[0277] Therapeutic formulations of the active PRO molecule, preferably a polypeptide or antibody of the invention, are prepared for storage by mixing the active molecule having the desired degree of purity with optional pharmaceutically acceptable carriers, excipients or stabilizers (Remington's Pharmaceutical Sciences 16th edition, Osol, A. Ed. [1980]), in the form of lyophilized formulations or aqueous solutions. Acceptable carriers, excipients, or stabilizers are nontoxic to recipients at the dosages and concentrations employed, and include buffers such as phosphate, citrate, and other organic acids; antioxidants including ascorbic acid and methionine; preservatives (such as octadecyldimethylbenzyl ammonium chloride; hexamethonium chloride; benzalkonium chloride, benzethonium chloride; phenol, butyl or benzyl alcohol; alkyl parabens such as methyl or propyl paraben; catechol; resorcinol; cyclohexanol; 3-pentanol; and m-cresol); low molecular weight (less than about 10 residues) polypeptides; proteins, such as serum albumin, gelatin, or immunoglobulins; hydrophilic polymers such as polyvinylpyrrolidone; amino acids such as glycine, glutamine, asparagine, histidine, arginine, or lysine; monosaccharides, disaccharides, and other carbohydrates including glucose, mannose, or dextrins; chelating agents such as EDTA; sugars such as sucrose, mannitol, trehalose or sorbitol; salt-forming counter-ions such as sodium; metal complexes (e.g., Zn-protein complexes); and/or non-ionic surfactants such as TWEEN™, PLURONICS™ or polyethylene glycol (PEG).

[0278] Compounds identified by the screening assays disclosed herein can be formulated in an analogous manner, using standard techniques well known in the art.

[0279] Lipofections or liposomes can also be used to deliver the PRO molecule into cells. Where antibody fragments are used, the smallest inhibitory fragment which specifically binds to the binding domain of the target protein is preferred. For example, based upon the variable region sequences of an antibody, peptide molecules can be designed which retain the ability to bind the target protein sequence. Such peptides can be synthesized chemically and/or produced by recombinant DNA technology (see, e.g., Marasco et al., Proc. Natl. Acad. Sci. USA 90, 7889-7893 [1993]).

[0280] The formulation herein may also contain more than one active compound as necessary for the particular indication being treated, preferably those with complementary activities that do not adversely affect each other. Alternatively, or in addition, the composition may comprise a cytotoxic agent, cytokine or growth inhibitory agent. Such molecules are suitably present in combination in amounts that are effective for the purpose intended.

[0281] The active PRO molecules may also be entrapped in microcapsules prepared, for example, by coacervation techniques or by interfacial polymerization, for example, hydroxymethylcellulose or gelatin-microcapsules and poly-(methylmethacylate) microcapsules, respectively, in colloidal drug delivery systems (for example, liposomes, albumin microspheres, microemulsions, nano-particles and nanocapsules) or in macroemulsions. Such techniques are disclosed in Remington's Pharmaceutical Sciences 16th edition, Osol, A. Ed. (1980).

[0282] The formulations to be used for in vivo administration must be sterile. This is readily accomplished by filtration through sterile filtration membranes.

[0283] Sustained-release preparations of the PRO molecules may be prepared. Suitable examples of sustained-release preparations include semipermeable matrices of solid hydrophobic polymers containing the antibody, which matrices are in the form of shaped articles, e.g., films, or microcapsules. Examples of sustained-release matrices include polyesters, hydrogels (for example, poly(2-hydroxyethyl-methacrylate), or poly(vinylalcohol)), polylactides (U.S. Pat. No. 3,773,919), copolymers of L-glutamic acid and γ-ethyl-L-glutamate, non-degradable ethylene-vinyl acetate, degradable lactic acid-glycolic acid copolymers such as the LUPRON DEPOT™ (injectable microspheres composed of lactic acid-glycolic acid copolymer and leuprolide acetate), and poly-D-(−)-3-hydroxybutyric acid. While polymers such as ethylene-vinyl acetate and lactic acid-glycolic acid enable release of molecules for over 100 days, certain hydrogels release proteins for shorter time periods. When encapsulated antibodies remain in the body for a long time, they may denature or aggregate as a result of exposure to moisture at 37° C., resulting in a loss of biological activity and possible changes in immunogenicity. Rational strategies can be devised for stabilization depending on the mechanism involved. For example, if the aggregation mechanism is discovered to be intermolecular S—S bond formation through thio-disulfide interchange, stabilization may be achieved by modifying sulfhydryl residues, lyophilizing from acidic solutions, controlling moisture content, using appropriate additives, and developing specific polymer matrix compositions.

[0284] N. Methods of Treatment

[0285] It is contemplated that the polypeptides, antibodies and other active compounds of the present invention may be used to treat psoriasis, IBD and related conditions, such as T cell mediated diseases, including those characterized by infiltration of inflammatory cells into a tissue.

[0286] Spondyloarthropathies are a group of disorders with some common clinical features and the common association with the expression of HLA-B27 gene product. The disorders include: ankylosing spondylitis, Reiter's syndrome (reactive arthritis), arthritis associated with inflammatory bowel disease, spondylitis associated with psoriasis, juvenile onset spondyloarthropathy and undifferentiated spondyloarthropathy. Distinguishing features include sacroileitis with or without spondylitis; inflammatory asymmetric arthritis; association with HLA-B27 (a serologically defined allele of the HLA-B locus of class I MHC); ocular inflammation, and absence of autoantibodies associated with other rheumatoid disease. The cell most implicated as key to induction of the disease is the CD8+ T lymphocyte, a cell which targets antigen presented by class I MHC molecules. CD8+ T cells may react against the class I MHC allele HLA-B27 as if it were a foreign peptide expressed by MHC class 1 molecules. It has been hypothesized that an epitope of HLA-B27 may mimic a bacterial or other microbial antigenic epitope and thus induce a CD8+ T cells response.

[0287] Systemic sclerosis (scleroderma) has an unknown etiology. A hallmark of the disease is induration of the skin; likely this is induced by an active inflammatory process. Scleroderma can be localized or systemic; vascular lesions are common and endothelial cell injury in the microvasculature is an early and important event in the development of systemic sclerosis; the vascular injury may be immune mediated. An immunologic basis is implied by the presence of mononuclear cell infiltrates in the cutaneous lesions and the presence of anti-nuclear antibodies in many patients. ICAM-1 is often upregulated on the cell surface of fibroblasts in skin lesions suggesting that T cell interaction with these cells may have a role in the pathogenesis of the disease. Other organs involved include: the gastrointestinal tract: smooth muscle atrophy and fibrosis resulting in abnormal peristalsis/motility; kidney: concentric subendothelial intimal proliferation affecting small arcuate and interlobular arteries with resultant reduced renal cortical blood flow, results in proteinuria, azotemia and hypertension; skeletal muscle: atrophy, interstitial fibrosis; inflammation; lung: interstitial pneumonitis and interstitial fibrosis; and heart: contraction band necrosis, scarring/fibrosis.

[0288] Autoimmune or Immune-mediated Skin Disease including Bullous Skin Diseases, Erythema Multiforme, and Contact Dermatitis are mediated by auto-antibodies, the genesis of which is T lymphocyte-dependent.

[0289] Psoriasis is proposed to be a T lymphocyte-mediated inflammatory disease. Lesions contain infiltrates of T lymphocytes, macrophages and antigen processing cells, and some neutrophils.

[0290] Transplantation associated diseases, including Graft rejection and Graft-Versus-Host-Disease (GVHD) are T lymphocyte-dependent; inhibition of T lymphocyte function is ameliorative.

[0291] The compounds of the present invention, e.g., polypeptides or antibodies, are administered to a mammal, preferably a human, in accord with known methods, such as intravenous administration as a bolus or by continuous infusion over a period of time, by intramuscular, intraperitoneal, intracerobrospinal, subcutaneous, intra-articular, intrasynovial, intrathecal, oral, topical, or inhalation (intranasal, intrapulmonary) routes. Intravenous or inhaled administration of polypeptides and antibodies is preferred.

[0292] In immunoadjuvant therapy, other therapeutic regimens, such administration of an anti-cancer agent, may be combined with the administration of the proteins, antibodies or compounds of the instant invention. For example, the patient to be treated with a the immunoadjuvant of the invention may also receive an anti-cancer agent (chemotherapeutic agent) or radiation therapy. Preparation and dosing schedules for such chemotherapeutic agents may be used according to manufacturers' instructions or as determined empirically by the skilled practitioner. Preparation and dosing schedules for such chemotherapy are also described in Chemotherapy Service Ed., M. C. Perry, Williams & Wilkins, Baltimore, Md. (1992). The chemotherapeutic agent may precede, or follow administration of the immunoadjuvant or may be given simultaneously therewith. Additionally, an anti-estrogen compound such as tamoxifen or an anti-progesterone such as onapristone (see, EP 616812) may be given in dosages known for such molecules.

[0293] It may be desirable to also administer antibodies against other immune disease associated or tumor associated antigens, such as antibodies which bind to CD20, CD11a, CD 18, ErbB2, EGFR, ErbB3, ErbB4, or vascular endothelial factor (VEGF). Alternatively, or in addition, two or more antibodies binding the same or two or more different antigens disclosed herein may be coadministered to the patient. Sometimes, it may be beneficial to also administer one or more cytokines to the patient. In one embodiment, the PRO polypeptides are coadministered with a growth inhibitory agent. For example, the growth inhibitory agent may be administered first, followed by a PRO polypeptide. However, simultaneous administration or administration first is also contemplated. Suitable dosages for the growth inhibitory agent are those presently used and may be lowered due to the combined action (synergy) of the growth inhibitory agent and the PRO polypeptide.

[0294] For the treatment or reduction in the severity of immune related disease, the appropriate dosage of an a compound of the invention will depend on the type of disease to be treated, as defined above, the severity and course of the disease, whether the agent is administered for preventive or therapeutic purposes, previous therapy, the patient's clinical history and response to the compound, and the discretion of the attending physician. The compound is suitably administered to the patient at one time or over a series of treatments.

[0295] For example, depending on the type and severity of the disease, about 1 μg/kg to 15 mg/kg (e.g., 0.1-20 mg/kg) of polypeptide or antibody is an initial candidate dosage for administration to the patient, whether, for example, by one or more separate administrations, or by continuous infusion. A typical daily dosage might range from about 1 μg/kg to 100 mg/kg or more, depending on the factors mentioned above. For repeated administrations over several days or longer, depending on the condition, the treatment is sustained until a desired suppression of disease symptoms occurs. However, other dosage regimens may be useful. The progress of this therapy is easily monitored by conventional techniques and assays.

[0296] O. Articles of Manufacture

[0297] In another embodiment of the invention, an article of manufacture containing materials (e.g., comprising a PRO molecule) useful for the diagnosis or treatment of the disorders described above is provided. The article of manufacture comprises a container and an instruction. Suitable containers include, for example, bottles, vials, syringes, and test tubes. The containers may be formed from a variety of materials such as glass or plastic. The container holds a composition which is effective for diagnosing or treating the condition and may have a sterile access port (for example the container may be an intravenous solution bag or a vial having a stopper pierceable by a hypodermic injection needle). The active agent in the composition is usually a polypeptide or an antibody of the invention. An instruction or label on, or associated with, the container indicates that the composition is used for diagnosing or treating the condition of choice. The article of manufacture may further comprise a second container comprising a pharmaceutically-acceptable buffer, such as phosphate-buffered saline, Ringer's solution and dextrose solution. It may further include other materials desirable from a commercial and user standpoint, including other buffers, diluents, filters, needles, syringes, and package inserts with instructions for use.

[0298] P. Diagnosis and Prognosis of Immune Related Disease

[0299] Cell surface proteins, such as proteins which are overexpressed in immune related disease, are excellent targets for drug candidates or disease treatment. The same proteins along with secreted proteins encoded by the genes amplified in immune related disease find additional use in the diagnosis and prognosis of this disease. For example, antibodies directed against the protein products of genes amplified in immune related disease, can be used as diagnostics or prognostics.

[0300] For example, antibodies, including antibody fragments, can be used to qualitatively or quantitatively detect the expression of proteins encoded by amplified or overexpressed genes (“marker gene products”). The antibody preferably is equipped with a detectable, e.g., fluorescent label, and binding can be monitored by light microscopy, flow cytometry, fluorimetry, or other techniques known in the art. These techniques are particularly suitable, if the overexpressed gene encodes a cell surface protein. Such binding assays are performed essentially as described above.

[0301] In situ detection of antibody binding to the marker gene products can be performed, for example, by immunofluorescence or immunoelectron microscopy. For this purpose, a histological specimen is removed from the patient, and a labeled antibody is applied to it, preferably by overlaying the antibody on a biological sample. This procedure also allows for determining the distribution of the marker gene product in the tissue examined. It will be apparent for those skilled in the art that a wide variety of histological methods are readily available for in situ detection.

[0302] The following examples are offered for illustrative purposes only, and are not intended to limit the scope of the present invention in any way.

[0303] All patent and literature references cited in the present specification are hereby incorporated by reference in their entirety.

### EXAMPLES

[0304] Commercially available reagents referred to in the examples were used according to manufacturer's instructions unless otherwise indicated. The source of those cells identified in the following examples, and throughout the specification, by ATCC accession numbers is the American Type Culture Collection, Manassas, Va.

### Example 1

### Microarray Analysis of Systemic Lupus Erythematosis (SLE)

[0305] Systemic Lupus Erythematosus (SLE) is an autoimmune diseases characterized by chronic relapsing inflammation of various tissue sites, primarily kidney, which result in tissue destruction. SLE is more common in women and genetic susceptibility is thought to contribute to the dysregulation of the immune system. Animal studies as well as human clinical experience have also demonstrated that environmental factors also contribute to these diseases. While the etiology and pathogenesis of SLE is still poorly understood, B cells, T cells and monocytes have all been implicated as playing critical roles in disease progression. Therapeutics know to target these cell types have been shown to impact disease preogression in human as well as animal studies. Analysis of the gene expression patterns of white blood cells from healthy individuals compared to SLE patients was carried out using Affymetrix® GeneChips®. The identification of genes that are differentially expressed in disease vs healthy cells is likely to provide important information as to the role of these gene products in the pathogenesis of disease. These disease associated genes may be used as targets or therapies for the treatment of SLE and other autoimmune mediated inflammatory diseases and may include the gene products themselves as well as antibody, peptide or small molecule antagonists. The identification of genes that are differentially expressed in disease vs healthy cells is likely to provide important information as to the role of these gene products in the pathogenesis of disease. These disease associated genes may be used as targets or therapies for the treatment of SLE and other autoimmune mediated inflammatory diseases and may include the gene products themselves as well as antibody, peptide or small molecule antagonists.

[0306] Nucleic acid microarrays, often containing thousands of gene sequences, are useful for identifying differentially expressed genes in diseased tissues as compared to their normal counterparts. Using nucleic acid microarrays, test and control mRNA samples from test and control tissue samples are reverse transcribed and labeled to generate cDNA probes. The cDNA probes are then hybridized to an array of nucleic acids immobilized on a solid support. The array is configured such that the sequence and position of each member of the array is known. For example, a selection of genes known to be expressed in certain disease states may be arrayed on a solid support. Hybridization of a labeled probe with a particular array member indicates that the sample from which the probe was derived expresses that gene. If the hybridization signal of a probe from a test (in this instance, Peripheral Blood Mononuclear cells (PBMC) taken from whole blood of SLE patients) sample is greater than hybridization signal of a probe from a control (in this instance, normal PBMC) sample, the gene or genes overexpressed in the test tissue are identified. The implication of this result is that an overexpressed protein in a test tissue is useful not only as a diagnostic marker for the presence of the disease condition, but also as a therapeutic target for treatment of the disease condition.

[0307] The methodology of hybridization of nucleic acids and microarray technology is well known in the art. In one example, the specific preparation of nucleic acids for hybridization and probes, slides, and hybridization conditions are all detailed in PCT Patent Application Serial No. PCT/US01/10482, filed on Mar. 30, 2001 and which is herein incorporated by reference.

[0308] Peripheral blood mononuclear cells (PBMCs) from SLE patients and from healthy donors (henceforth, “normal PBMCs”) were obtained. For each SLE patient, PBMCs were isolated in order to identify disease specific genes which are differentially expressed in the blood of SLE patients. All samples were stored at −70° C. until ready for RNA isolation. The PBMCs were homogenized in 600 μl of RLT buffer (+BME) and RNA was isolated using Qiagen™ Rneasy Mini columns (Qiagen) with on-column DNase treatment following the manufacturer's guidelines. Following RNA isolation, RNA was quantitated using RiboGreen™ (Molecular Probes) following the manufacturer's guidelines and checked on agarose gels for integrity. 4 μg of RNA was labeled for microarray analysis and samples were run on proprietary Genentech microarray and Affymetrics microarrays. Genes were compared whose expression was upregulated in PBMCs from SLE patients vs normal PBMCs as a control. As such, these molecules are excellent targets for the diagnosis and therapy for SLE in mammals.

[0309] The results of these experiments show that the nucleic acids and corresponding PRO polypeptides as shown in SEQ ID NOs: 1, 3, 5, 7, 9, 11, 13, 15, 19, 21, 25, 26, 28, 30, 36, 38, 40, 42, 44, 46, 48, 54, 56, 58, 62, 64, 66, 69, 72, 74, 76, 80, 84, 86, 88, 90, 92, 94, 97, 99, 101, 103, 105, 109, 111, 115, 117, 119, 121, 125, 127, 129, 133, 135, 137, 141, 146, 148, 150, 152, 158, 160, 162, 168, 170, 172, 176, 180, 184, 186, 188, 190, 192, 194, 196, 200, 202, 204, 206, 208, 210, 212, 214, 216, 220, 222, 226, 228, 230, 232, 234, 236, 242, 246, 248, 250, 252, 254, 256, 258, 262, 264, 268, 270, 274, 276, 278, 280, 282, 288, 290, 296, 298, 300, 304, 306, 308, 310, 312, 314, 315, 317, 319, 321, 325, 327, 329, 331, 333, 335, 343, 345, 349, 351, 355, 359, 361, 363, 365, 367, 369, 373, 381, 383, 385, 386, 388, 390, 392, 394, 398, 400, 402, 404, 406, 408, 409, 411, 412, 414, 416, 417, 418, 420, 423, 425, 427, 429, 430, 435, 439, 441, 443, 445, 447, 450, 451, 453, 456, 458, 460, 462, 464, 466, 470, 472, 474, 476, 478, 480, 482, 484, 486, 488, 490, 492, 494, 496, 498, 500, 504, 506, 507, 509, 513, 515, 517, 518, 522, 523, 525, 529, 531, 533, 535, 536, 538, 540, 544, 548, 551, 553, 555, 559, 564, 566, 568, 570, 572, 574, 576, 578, 580, 582, 586, 588, 595, 597, 601, 603, 607, 609, 611, 613, 619, 621, 623, 625, 631, 633, 635, 638, 642, 646, 648, 652, 654, 656, 660, 663, 665, 667, 669, 671, 673, 677, 679, 681, 683, 685, 686, 690, 692, 694, 695, 697, 699, 701, 703, 705, 707, 708, 710, 714, 715, 717, 719, 721, 724, 728, 730, 731, 734, 735, 737, 738, 740, 743, 746, 748, 750, 752, 754, 756, 758, 759, 760, 762, 764, 765, 767, 769, 771, 773, 775, 778, 780, 782, 784, 786, 788, 790, 792, 794, 796, 797, 799, 801, 802, 803, 806, 807, 809, 811, 813, 815, 817, 819, 821, 822, 824, 825, 827, 829, 834, 837, 838, 842, 844, 845, 847, 849, 850, 851, 853, 855, 857, 859, 863, 865, 866, 867, 869, 870, 874, 875, 878, 880, 882, 886, 888, 890, 892, 893, 897, 898, 900, 902, 903, 906, 908, 910, 912, 914, 916, 917, 919, 921, 923, 924, 925, 926, 931, 933, 935, 940, 941, 944, 950, 952, 953, 958, 960, 961, 962, 964, 965, 969, 971, 973, 976, 978, 983, 985, 986, 988, 989, 990, 992, 994, 999, 1001, 1004, 1005, 1012, 1014, 1016, 1019, 1021, 1022, 1023, 1025, 1029, 1030, 1032, 1033, 1034, 1036, 1038, 1040, 1042, 1044, 1045, 1046, 1049, 1050, 1051, 1054, 1055, 1057 and 1058 are the nucleic acids and corresponding PRO polypeptides of the present invention and are overexpressed in PBMC from SLE patients as compared to normal PBMC taken from twenty-five healthy individuals and optionally relatively low expression in normal essential and/or normal proliferating tissues. The nucleic acids and encoded PRO polypeptides as shown in SEQ ID NO:76, SEQ ID NO:208, SEQ ID NO:234, SEQ ID NO:484, SEQ ID NO:486, SEQ ID NO:533, SEQ ID NO:576, SEQ ID NO:660, SEQ ID NO:797 and SEQ ID NO:1012 are highly overexpressed in PBMC isolated from patients with SLE as compared to normal PBMC.

### Example 2

### Microarray Analysis of Rheumatoid Arthritis

[0310] Rheumatoid Arthritis (RA) is an autoimmune disease characterized by chronic relapsing inflammation of various tissue sites, primarily bone and joint, which result in tissue destruction. RA is more common in women and genetic susceptibility is thought to contribute to the dysregulation of the immune system. Animal studies as well as human clinical experience have also demonstrated that environmental factors also contribute to these diseases. While the etiology and pathogenesis of RA is still poorly understood, B cells, T cells and monocytes have all been implicated as playing critical roles in disease progression. Therapeutics know to target these cell types have been shown to impact disease progression in human as well as animal studies. Analysis of the gene expression patterns of white blood cells from healthy individuals compared to RA patients was carried out using DNA microarrays. The identification of genes that are differentially expressed in disease vs healthy cells is likely to provide important information as to the role of these gene products in the pathogenesis of disease. These disease associated genes may be used as targets or therapies for the treatment of RA and other autoimmune mediated inflammatory diseases and may include the gene products themselves as well as antibody, peptide or small molecule antagonists.

[0311] Nucleic acid microarrays, often containing thousands of gene sequences, are useful for identifying differentially expressed genes in diseased tissues as compared to their normal counterparts. Using nucleic acid microarrays, test and control mRNA samples from test and control tissue samples are reverse transcribed and labeled to generate cDNA probes. The cDNA probes are then hybridized to an array of nucleic acids immobilized on a solid support. The array is configured such that the sequence and position of each member of the array is known. For example, a selection of genes known to be expressed in certain disease states may be arrayed on a solid support. Hybridization of a labeled probe with a particular array member indicates that the sample from which the probe was derived expresses that gene. If the hybridization signal of a probe from a test (in this instance, Peripheral Blood Mononuclear cells (PBMC) taken from whole blood of RA patients) sample is greater than hybridization signal of a probe from a control (in this instance, normal PBMC) sample, the gene or genes overexpressed in the test tissue are identified. The implication of this result is that an overexpressed protein in a test tissue is useful not only as a diagnostic marker for the presence of the disease condition, but also as a therapeutic target for treatment of the disease condition.

[0312] The methodology of hybridization of nucleic acids and microarray technology is well known in the art. In one example, the specific preparation of nucleic acids for hybridization and probes, slides, and hybridization conditions are all detailed in PCT Patent Application Serial No. PCT/US01/10482, filed on Mar. 30, 2001 and which is herein incorporated by reference.

[0313] Peripheral blood mononuclear cells (PBMCs) from RA patients and from healthy donors (henceforth, “normal PBMCs”) were obtained. For each RA patient, PBMCs were isolated in order to identify disease specific genes which are differentially expressed in the blood of psoriatic patients. All samples were stored at −70° C. until ready for RNA isolation. The PBMCs were homogenized in 600 μl of RLT buffer (+BME) and RNA was isolated using Qiagen™ Rneasy Mini columns (Qiagen™) with on-column DNase treatment following the manufacturer's guidelines. Following RNA isolation, RNA was quantitated using RiboGreen™ (Molecular Probes) following the manufacturer's guidelines and checked on agarose gels for integrity. 4 μg of RNA was labeled for microarray analysis and samples were run on proprietary Genentech microarray and Affymetrics microarrays. Genes were compared whose expression was upregulated in PBMCs from RA patients vs normal PBMCs as a control.

[0314] The following is a list of molecules whose tissue expression profile evidences high tissue expression and significant upregulation of expression in PBMC from RA patients as compared to normal PBMC taken from twenty-five healthy individuals and optionally relatively low expression in normal essential and/or normal proliferating tissues. As such, the molecules listed below are excellent polypeptide targets for the diagnosis and therapy for RA in mammals.

[0315] The results of these experiments, is that the nucleic acids and encoded PRO polypeptides as shown in SEQ ID NOs 9, 13, 17, 58, 64, 78, 82, 90, 97, 99, 103, 105, 113, 115, 131, 133, 135, 137, 139, 142, 154, 156, 158, 160, 162, 164, 166, 168, 176, 178, 182, 184, 192, 200, 206, 208, 210, 214, 218, 222, 232, 236, 238, 244, 248, 250, 256, 260, 266, 270, 272, 278, 284, 292, 325, 329, 331, 335, 337, 339, 343, 357, 365, 369, 371, 373, 375, 377, 383, 400, 414, 416, 417, 420, 422, 430, 435, 437, 441, 443, 445, 460, 470, 472, 482, 502, 509, 511, 515, 517, 525, 527, 540, 542, 546, 551, 576, 584, 591, 597, 599, 609, 613, 623, 625, 627, 629, 631, 635, 640, 654, 661, 671, 675, 677, 679, 685, 686, 699, 701, 703, 710, 715, 721, 724, 726, 730, 734, 735, 738, 740, 741, 743, 744, 752, 754, 758, 769, 771, 776, 782, 786, 794, 796, 799, 809, 813, 821, 830, 837, 845, 857, 859, 866, 867, 870, 875, 884, 890, 900, 906, 908, 912, 928, 931, 938, 941, 949, 955, 961, 964, 965, 967, 974, 982, 983, 986, 989, 990, 1007, 1014, 1016, 1017, 1029, 1038, 1048, 1050, 1052, 1056 and 1059 are differentially expressed in PBMC isolated from patients with RA as compared to normal PBMC. The nucleic acids and encoded PRO polypeptides as shown in SEQ ID NO:82, SEQ ID NO:337, SEQ ID NO:416, SEQ ID NO:420, SEQ ID NO:422, SEQ ID NO:609, SEQ ID NO:699, SEQ ID NO:794, SEQ ID NO:796, and SEQ ID NO:867 are highly overexpressed in PBMC isolated from patients with RA as compared to normal PBMC.

### Example 3

### Microarray Analysis of Pro Polypeptides in Ulcerative Colitis

[0316] The term inflammatory bowel disorder (“IBD”) describes a group of chronic inflammatory disorders of unknown causes in which the intestine (bowel) becomes inflamed, often causing recurring cramps or diarrhea. The prevalence of IBD in the U.S. is estimated to be about 200 per 100,000 population. Patients with IBD can be divided into two major groups, those with ulcerative colitis (“UC”) and those with Crohn's disease (“CD”).

[0317] In patients with UC, there is an inflammatory reaction primarily involving the colonic mucosa. The inflammation is typically uniform and continuous with no intervening areas of normal mucosa. Surface mucosal cells as well as crypt epithelium and submucosa are involved in an inflammatory reaction with neutrophil infiltration. Ultimately, this situation typically progresses to epithelial damage with loss of epithelial cells resulting in multiple ulcerations, fibrosis, dysplasia and longitudinal retraction of the colon.

[0318] CD differs from UC in that the inflammation extends through all layers of the intestinal wall and involves mesentery as well as lymph nodes. CD may affect any part of the alimentary canal from mouth to anus. The disease is often discontinuous, i.e., severely diseased segments of bowel are separated from apparently disease-free areas. In CD, the bowel wall also thickens which can lead to obstructions. In addition, fistulas and fissures are not uncommon.

[0319] Clinically, IBD is characterized by diverse manifestations often resulting in a chronic, unpredictable course. Bloody diarrhea and abdominal pain are often accompanied by fever and weight loss. Anemia is not uncommon, as is severe fatigue. Joint manifestations ranging from arthralgia to acute arthritis as well as abnormalities in liver function are commonly associated with IBD. Patients with IBD also have an increased risk of colon carcinomas compared to the general population. During acute “attacks” of IBD, work and other normal activity are usually impossible, and often a patient is hospitalized.

[0320] Although the cause of IBD remains unknown, several factors such as genetic, infectious and immunologic susceptibility have been implicated. IBD is much more common in Caucasians, especially those of Jewish descent. The chronic inflammatory nature of the condition has prompted an intense search for a possible infectious cause. Although agents have been found which stimulate acute inflammation, none has been found to cause the chronic inflammation associated with IBD. The hypothesis that IBD is an autoimmune disease is supported by the previously mentioned extraintestinal manifestation of IBD as joint arthritis, and the known positive response to IBD by treatment with therapeutic agents such as adrenal glucocorticoids, cyclosporine and azathioprine, which are known to suppress immune response. In addition, the GI tract, more than any other organ of the body, is continuously exposed to potential antigenic substances such as proteins from food, bacterial byproducts (LPS), etc.

[0321] Once the diagnosis has been made, typically by endoscopy, the goals of therapy are to induce and maintain a remission. The least toxic agents which patients are typically treated with are the aminosalicylates. Sulfasalazine (Azulfidine), typically administered four times a day, consists of an active molecule of aminosalicylate (5-ASA) which is linked by an azo bond to a sulfapyridine. Anaerobic bacteria in the colon split the azo bond to release active 5-ASA. However, at least 20% of patients cannot tolerate sulfapyridine because it is associated with significant side-effects such as reversible sperm abnormalities, dyspepsia or allergic reactions to the sulpha component. These side effects are reduced in patients taking olsalazine. However, neither sulfasalazine nor olsalazine are effective for the treatment of small bowel inflammation. Other formulations of 5-ASA have been developed which are released in the small intestine (e.g. mesalamine and asacol). Normally it takes 6-8 weeks for 5-ASA therapy to show full efficacy. Patients who do not respond to 5-ASA therapy, or who have a more severe disease, are prescribed corticosteroids. However, this is a short term therapy and cannot be used as a maintenance therapy. Clinical remission is achieved with corticosteroids within 2-4 weeks, however the side effects are significant and include a Cushing goldface, facial hair, severe mood swings and sleeplessness. The response to sulfasalazine and 5-aminosalicylate preparations is poor in Crohn's disease, fair to mild in early ulcerative colitis and poor in severe ulcerative colitis. If these agents fail, powerful immunosuppressive agents such as cyclosporine, prednisone, 6-mercaptopurine or azathioprine (converted in the liver to 6-mercaptopurine) are typically tried. For Crohn's disease patients, the use of corticosteroids and other immunosuppressives must be carefully monitored because of the high risk of intra-abdominal sepsis originating in the fistulas and abscesses common in this disease. Approximately 25% of IBD patients will require surgery (colectomy) during the course of the disease.

[0322] Further, the risk of colon cancer is elevated (≧32×) in patients with severe ulcerative colitis, particularly if the disease has existed for several years. About 20-25% of patients with IBD eventually require surgery for removal of the colon because of massive bleeding, chronic debilitating illness, performation of the colon, or risk of cancer. Surgery is also sometimes performed when other forms of medical treatment fail or when the side effects of steroids or other medications threaten the patient's health. As surgery is invasive and drastically life altering, it is not a highly desirable treatment regimen, and is typically the treatment of last resort.

[0323] In addition to pharmaceutical medicine and surgery, nonconventional treatments for IBD such as nutritional therapy have also been attempted. For example, Flexical®, a semi-elemental formula, has been shown to be as effective as the steroid prednisolone. Sanderson et al., Arch. Dis. Child. 51:123-7 (1987). However, semi-elemental formulas are relatively expensive and are typically unpalatable—thus their use has been restricted. Nutritional therapy incorporating whole proteins has also been attempted to alleviate the symptoms of IBD. Giafer et al., Lancet 335: 816-9 (1990). U.S. Pat. No. 5,461,033 describes the use of acidic casein isolated from bovine milk and TGF-2. Beattie et al., Aliment. Pharmacol. Ther. 8: 1-6 (1994) describes the use of casein in infant formula in children with IBD. U.S. Pat. No. 5,952,295 describes the use of casein in an enteric formulation for the treatment of IBD. However, while nutritional therapy is non-toxic, it is only a palliative treatment and does not treat the underlying cause of the disease.

[0324] Nucleic acid microarrays, often containing thousands of gene sequences, are useful for identifying differentially expressed genes in diseased tissues as compared to their normal counterparts. Using nucleic acid microarrays, test and control mRNA samples from test and control tissue samples are reverse transcribed and labeled to generate cDNA probes. The cDNA probes are then hybridized to an array of nucleic acids immobilized on a solid support. The array is configured such that the sequence and position of each member of the array is known. For example, a selection of genes known to be expressed in certain disease states may be arrayed on a solid support. Hybridization of a labeled probe with a particular array member indicates that the sample from which the probe was derived expresses that gene. If the hybridization signal of a probe from a test (for example, disease tissue) sample is greater than hybridization signal of a probe from a control (for example, normal tissue) sample, the gene or genes overexpressed in the disease tissue are identified. The implication of this result is that an overexpressed protein in a disease tissue is useful not only as a diagnostic marker for the presence of the disease condition, but also as a therapeutic target for treatment of the disease condition.

[0325] The methodology of hybridization of nucleic acids and microarray technology is well known in the art. In one example, the specific preparation of nucleic acids for hybridization and probes, slides, and hybridization conditions are all detailed in PCT Patent Application Serial No. PCT/US01/10482, filed on Mar. 30, 2001 and which is herein incorporated by reference.

[0326] Microarray analysis was used to find genes that are overexpressed in IBD as compared to normal bowel tissue. Biopsies from patients with IBD were obtained. For each IBD patient, samples were taken from disease tissue and from healthy bowel, so that expression patterns could be better compared. All samples were stored at −70° C. until ready for RNA isolation. The biopsies were homogenized in 600 μl of RLT buffer (+BME) and RNA was isolated using Qiagen™ Rneasy Mini columns (Qiagen) with on-column DNase treatment following the manufacturer's guidelines. Following RNA isolation, RNA was quantitated using RiboGreen™ (Molecular Probes) following the manufacturer's guidelines and checked on agarose gels for integrity. Appropriate amounts of RNA were labeled for microarray analysis and samples were run on proprietary Genentech microarray and Affymetrics™ microarrays. Genes were compared whose expression was upregulated in UC tissue vs normal bowel, matching biopsies from normal bowel and UC tissue from the same patient. The results of this experiment showed that the nucleic acids and encoded PRO polypeptides as shown in SEQ ID NOs: 11, 21, 26, 30, 36, 44, 52, 78, 82, 86, 90, 119, 133, 139, 144, 162, 168, 170, 178, 184, 218, 270, 276, 315, 317, 329, 335, 337, 363, 375, 379, 383, 388, 404, 416, 420, 422, 429, 430, 432, 445, 447, 448, 468, 470, 525, 536, 538, 551, 553, 555, 564, 568, 574, 576, 597, 599, 609, 615, 625, 635, 640, 642, 650, 656, 667, 685, 690, 699, 715, 721, 735, 741, 743, 744, 756, 776, 788, 794, 802, 807, 832, 845, 863, 867, 870, 884, 904, 907, 917, 919, 928, 949, 973, 974, 989, 1017, 1038, 1050 and 1059 are differentially expressed in Ulcerative Colitis tissue in comparison to normal tissue. The nucleic acids and encoded PRO polypeptides as shown in SEQ ID NO:21, SEQ ID NO:44, SEQ ID NO: 82, SEQ ID NO:133, SEQ ID NO:276, SEQ ID NO:430, SEQ ID NO:568, SEQ ID NO:667, SEQ ID NO:741, and SEQ ID NO:928, are highly overexpressed in Ulcerative Colitis tissue compared to normal colon.

### Example 4

### Microarray Analysis of PRO Polypeptides in Psoriasis

[0327] Several diseases of the skin are correlated with an aberrant T cell response and to autoimmunity. Psoriasis is thought to be an autoimmune disease. Specifically, T-cells of the immune system recognize a protein in the skin and attack the area where that protein is found, causing the too-rapid growth of new skin cells and painful, elevated, scaly lesions. These lesions are characterized by hyperproliferation of keratinocytes and the accumulation of activated T-cells in the epidermis of the psoriatic lesions. There are several forms of psoriasis; guttate is the one that most commonly occurs in children and teens. It is sometimes preceded by an upper respiratory infection. Guttate psoriasis is noncontagious and characterized by small drop-like lesions, usually scattered over the trunk, limbs and scalp. According to the National Psoriasis Foundation, approximately seven million people in the United States have psoriasis. About 20,000 children are diagnosed with psoriasis annually, and many of the cases are attributed to upper respiratory infections. It is estimated that only about 1.5 million people with psoriasis actually seek treatment, primarily due to lack of or dissatisfaction with current treatments Although the initial molecular cause of disease is unknown, genetic linkages have been mapped to at least 7 psoriasis susceptibility chromosomal loci (Psor1 on 6p21.3, Psor2 on 17q, Psor3 on 4q, Psor4 on 1 cent-q21, Psor5 on 3q21, Psor6 on 19p13, and Psor7 on 1p). Some of these loci overlap with other autoimmune/inflammatory diseases including rheumatoid arthritis, atopic dermatitis, and irritable bowel disease.

[0328] Peripheral blood mononuclear cells (PBMCs) from psoriatic patients and from healthy donors (henceforth, “normal PBMCs”) were obtained. For each psoriatic patient, PBMCs were isolated in order to identify disease specific genes which are differentially expressed in the blood of psoriatic patients. All samples were stored at −70° C. until ready for RNA isolation. The PBMCs were homogenized in 600 μl of RLT buffer (+BME) and RNA was isolated using Qiagen™ Rneasy Mini columns (Qiagen) with on-column DNase treatment following the manufacturer's guidelines. Following RNA isolation, RNA was quantitated using RiboGreen™ (Molecular Probes) following the manufacturer's guidelines and checked on agarose gels for integrity. 4 μg of RNA was labeled for microarray analysis and samples were run on proprietary Genentech microarray and Affymetrics microarrays. Genes were compared whose expression was differentially expressed in PBMCs from psoriasis patients vs normal PBMCs as a control.

[0329] In addition, skin biopsies from psoriatic patients and from healthy donors (henceforth, “normal skin”) were obtained. For each psoriatic patient, skin samples were taken from lesional and non-lesional sites, in order to identify disease specific genes which are differentially expressed in psoriatic tissue. All of the psoriatic skin samples were analyzed for Keratin16 staining via immunohistochemistry and epidermal thickness. All samples were stored at −70° C. until ready for RNA isolation. The skin biopsies were homogenized in 600 μl of RLT buffer (+BME) and RNA was isolated using Qiagen™ Rneasy Mini columns (Qiagen) with on-column DNase treatment following the manufacturer's guidelines. Following RNA isolation, RNA was quantitated using RiboGreen™ (Molecular Probes) following the manufacturer's guidelines and checked on agarose gels for integrity. The RNA yields ranged from 19 to 54 μg for psoriatic lesional skin, 7.7 to 24 μg for non-lesional matched control skin and 5.4 to 10 μg for normal skin. 4 μg of RNA was labeled for microarray analysis and samples were run on proprietary Genentech microarray and Affymetrics microarrays. Genes were compared whose expression was differentially expressed in psoritic skin vs non-lesional skin, thus comparing expression profiles of non-lesional skin and psoritic skin from the same patient, and also comparing against normal skin biopsies of normal-healthy donors as a further control.

[0330] The conclusion of these experiments is that the nucleic acids and encoded PRO polypeptides as shown in SEQ ID NOs: 3, 5, 9, 11, 17, 19, 23, 25, 28, 30, 32, 34, 36, 38, 42, 44, 48, 50, 52, 54, 56, 60, 66, 67, 71, 74, 84, 96, 105, 107, 111, 115, 121, 123, 146, 148, 154, 174, 186, 190, 192, 198, 212, 224, 226, 232, 240, 264, 270, 274, 278, 286, 294, 298, 302, 304, 308, 312, 315, 323, 325, 341, 347, 353, 367, 375, 379, 383, 386, 388, 396, 400, 404, 412, 425, 430, 432, 434, 445, 448, 450, 455, 456, 464, 466, 468, 490, 500, 502, 520, 531, 538, 544, 549, 553, 555, 557, 559, 561, 563, 564, 574, 578, 582, 584, 586, 589, 593, 601, 605, 607, 609, 613, 615, 617, 619, 633, 635, 637, 638, 644, 650, 652, 654, 658, 661, 663, 665, 673, 679, 681, 683, 688, 695, 703, 707, 712, 715, 717, 719, 721, 723, 724, 728, 731, 733, 734, 743, 746, 748, 764, 776, 778, 784, 786, 792, 797, 803, 804, 807, 821, 822, 829, 832, 834, 835, 840, 858, 861, 863, 865, 869, 872, 876, 892, 893, 895, 906, 910, 919, 926, 930, 933, 936, 942, 944, 946, 948, 950, 951, 952, 955, 956, 961, 973, 976, 980, 982, 988, 996, 998, 1002, 1008, 1010, 1019, 1021, 1023, 1025, 1027, 1032, 1034, 1036, 1042, 1046, 1054, 1055 and 1058 are differentially expressed in psoriasis in comparison to matched non-lesional skin from psoriasis patients and normal skin taken from subjects without psoriasis or PBMC taken from psoriasis patients in comparison to normal PBMC. The nucleic acids and encoded PRO polypeptides as shown in SEQ ID NO:154, SEQ ID NO:400, SEQ ID NO:445, SEQ ID NO:555, SEQ ID NO:652, SEQ ID NO:665, SEQ ID NO:717, SEQ ID NO:734, SEQ ID NO:821, and SEQ ID NO:1010, are highly overexpressed in psoriasis in comparison to matched non-lesional skin from psoriasis patients and normal skin taken from subjects without psoriasis or PBMC taken from psoriasis patients in comparison to normal PBMC.

### Example 5

### Microarray Analysis of Stimulated T-Cells

[0331] T lymphocytes (T cells) are an important component of a mammalian immune response. T cells recognize antigens which are associated with a self-molecule encoded by genes within the major histocompatibility complex (MHC). The antigen may be displayed together with MHC molecules on the surface of antigen presenting cells, virus infected cells, cancer cells, grafts, etc. The T cell system eliminates these altered cells which pose a health threat to the host mammal. T cells include helper T cells and cytotoxic T cells. Helper T cells proliferate extensively following recognition of an antigen-MHC complex on an antigen presenting cell. Helper T cells also secrete a variety of cytokines, i.e., lymphokines, which play a central role in the activation of B cells, cytotoxic T cells and a variety of other cells which participate in the immune response.

[0332] CD4+ T cells are known to be important regulators of inflammation. Herein, CD4+ T cells were activated and the profile of genes differentially expressed upon activation was analyzed. As such, the activation specific genes may be potential therapeutic targets. In vivo co-stimulation is necessary for a productive immune proliferative response. The list of costimulatory molecules is quite extensive and it is still unclear just which co-stimulatory molecules play critical roles in different types and stages of inflammation. In this application the focus is on genes which are specifically upregulated or down-regulated by stimulation with anti-CD3/ICAM, or anti-CD3/anti-CD28 and may be useful in targeting inflammatory processes which are associated with these different molecules.

[0333] Nucleic acid microarrays, often containing thousands of gene sequences, are useful for identifying differentially expressed genes in diseased tissues as compared to their normal counterparts. Using nucleic acid microarrays, test and control mRNA samples from test and control tissue samples are reverse transcribed and labeled to generate cDNA probes. The cDNA probes are then hybridized to an array of nucleic acids immobilized on a solid support. The array is configured such that the sequence and position of each member of the array is known. For example, a selection of genes known to be expressed in certain disease states may be arrayed on a solid support. Hybridization of a labeled probe with a particular array member indicates that the sample from which the probe was derived expresses that gene. If the hybridization signal of a probe from a test (in this instance, activated CD4+ T cells) sample is greater than hybridization signal of a probe from a control (in this instance, non-stimulated CD4+ T cells) sample, the gene or genes overexpressed in the test tissue are identified. The implication of this result is that an overexpressed protein in a test tissue is useful not only as a diagnostic marker for the presence of the disease condition, but also as a therapeutic target for treatment of the disease condition.

[0334] The methodology of hybridization of nucleic acids and microarray technology is well known in the art. In one example, the specific preparation of nucleic acids for hybridization and probes, slides, and hybridization conditions are all detailed in PCT Patent Application Serial No. PCT/US01/10482, filed on Mar. 30, 2001 and which is herein incorporated by reference.

[0335] In this experiment, CD4+ T cells were purified from a single donor using the RossetteSep™ protocol from (Stem Cell Technologies, Vancouver BC) which contains anti-CD8, anti-CD16, anti-CD19, anti-CD36 and anti-CD56 antibodies used to produce a population of isolated CD4+ T cells. Isolated CD4+ T cells were activated with an anti-CD3 antibody (used at a concentration that does not stimulate proliferation) together with either ICAM-1 or anti-CD28 antibody. At 24 or 72 hours cells were harvested, RNA extracted and analysis run on Affimax (Affymetrix Inc. Santa Clara, Calif.) microarray chips. Non-stimulated (resting) cells were harvested immediately after purification, and subjected to the same analysis. Genes were compared whose expression was upregulated at either of the two timepoints in activated vs. resting cells.

[0336] The results of this experiment are the nucleic acids and encoded PRO polypeptides as shown in SEQ ID NOs 3, 11, 19, 25, 26, 30, 50, 58, 60, 66, 67, 94, 101, 103, 117, 125, 131, 142, 164, 166, 188, 192, 200, 204, 216, 220, 270, 292, 312, 321, 327, 341, 345, 351, 357, 379, 385, 392, 396, 398, 416, 430, 432, 435, 447, 468, 472, 484, 513, 517, 522, 523, 533, 536, 546, 578, 588, 627, 665, 679, 683, 685, 686, 701, 712, 714, 717, 738, 741, 754, 784, 796, 824, 838, 851, 867, 926, 950, 969, 989, 999, 1012, 1038, 1046, 1056, 1060, 1062, 1064, 1070, 1098, 1110, 1124, 1133, 1137, 1143, 1184, 1200, 1220, 1266 and 1268 show differential expression upon stimulation with anti-CD3/ICAM 1 and also show differential expression upon stimulation with anti-CD3/anti-CD28 as compared to isolated resting CD4+ T cells. The nucleic acids and encoded PRO polypeptides as shown in SEQ ID NO:58, SEQ ID NO:379, SEQ ID NO:665, SEQ ID NO:685, SEQ ID NO:714, SEQ ID NO:717, SEQ ID NO:538, SEQ ID NO:950, SEQ ID NO:1184 and SEQ ID NO:1200 are highly overexpressed in isolated CD4+ T cells activated by anti-CD3/ICAM-1 or anti-CD3/anti-CD28 as compared to isolated resting CD4+ T cells.

### Example 6

### Microarray Analysis of Memory T-Cells

[0337] T cells play a central role in host defense. T cells are able to modulate the immune response of other cell lineages through the production of a variety of cytokines and immune modulatory molecules. In addition they are responsible for surveying cells throughout the organism for the presence of non-self. This highly sophisticated process utilizes the T cell receptor (TCR), which is able to recognize and discriminate between self and non-self peptides displayed by the MHC complex on other cells. This process also integrates co-stimulatory signals that provide additional information to the T cell about the nature of the potential non-self threat. These two signals, the TCR signal and the co-stimulatory signal can be experimentally triggered by use of agonist antibodies such as certain antibodies to the T cell receptor component CD3, and the co-stimulatory receptor CD28. While T cells are essential components of normal immune function, it is believed that inappropriate T cell function underlies many very serious medical conditions including autoimmune disease. Diseases that are impacted by pathologic T cell function are thought to include asthma, arthritis, psoriasis, multiple sclerosis, inflammatory bowel disease, diabetes, graft versus host disease and many others. In these diseases the portion of the T cell repertoire that has a “memory” phenotype is thought to contribute to the disease pathology. It is therefore of great importance to understand the molecular events that occur upon activation of memory T cells. In humans, memory T cells can be identified through the use of the antigen CD45RO which is expressed on memory T cells but not on resting naïve T cells. The use of DNA microarrays provides a powerful experimental approach to identify molecular changes that occur upon activation of this critical cell population. Understanding the identity of molecules whose expression is altered upon memory T cell activation can enable therapeutic strategies that target the pathways impacted by these alterations in gene expression. Such therapeutic strategies can include the use of recombinant proteins, soluble receptors, antibodies, peptides, or small molecule drugs.

[0338] Nucleic acid microarrays, often containing thousands of gene sequences, are useful for identifying differentially expressed genes in diseased tissues as compared to their normal counterparts. Using nucleic acid microarrays, test and control mRNA samples from test and control tissue samples are reverse transcribed and labeled to generate cDNA probes. The cDNA probes are then hybridized to an array of nucleic acids immobilized on a solid support. The array is configured such that the sequence and position of each member of the array is known. For example, a selection of genes known to be expressed in certain disease states may be arrayed on a solid support. Hybridization of a labeled probe with a particular array member indicates that the sample from which the probe was derived expresses that gene. If the hybridization signal of a probe from a test (for example, activated CD4+ T cells) sample is greater than hybridization signal of a probe from a control (for example, non-stimulated CD4+ T cells) sample, the gene or genes overexpressed in the test tissue are identified. The implication of this result is that an overexpressed protein in a test tissue is useful not only as a diagnostic marker for the presence of the disease condition, but also as a therapeutic target for treatment of the disease condition.

[0339] The methodology of hybridization of nucleic acids and microarray technology is well known in the art. In one example, the specific preparation of nucleic acids for hybridization and probes, slides, and hybridization conditions are all detailed in PCT Patent Application Serial No. PCT/US01/10482, filed on Mar. 30, 2001 and which is herein incorporated by reference.

[0340] The specific conditions for this set of experiments began by collecting 100 ml of fresh blood from donors. Peripheral blood mononuclear cells (PBMC) were isolated with LSM (ficol) (ICN Biomedicals) by step gradient separation. Monocytes were depleted by adherence to culture flask. CD45 RA and CD45 RO high cells were sorted by FACS with additional gating on lymphocytes by forward and side scatter. Cells of intermediate expression of either CD45RA or CD45 RO were not collected. Sorting was verified by re-FACS of samples of the sorted population and found to be approximately 99% correctly sorted. Cells were cultured for 16 hours in RPMI 1640, 10% heat inactivated FBS, 100 units/mL of Penicillin, 100 mg/mL of streptomycin, 2 mM L-glutamine and IL-2 (100 U/ml) and in the presence or absence of plate bound anti-CD3 (10 ug/ml) and soluble anti-CD28 (10 ug/ml). The activation status of the cells was monitored by FACS for cell surface expression of CD69 and CD25. Cells were then pelleted and RNA isolated by Qiagen miniprep and analysis run on Genentech and Affimax™ (Affymetrix Inc. Santa Clara, Calif.) microarray chips. Non-stimulated (resting) cells were harvested immediately after purification, and subjected to the same analysis.

[0341] The results of these experiments, demonstrating that the nucleic acid and their encoded PRO polypeptides as shown in SEQ ID NOs 1, 3, 7, 9, 26, 44, 52, 54, 58, 60, 67, 71, 78, 82, 99, 101, 109, 123, 125, 129, 131, 135, 142, 148, 150, 156, 158, 162, 168, 176, 188, 192, 200, 204, 208, 216, 248, 256, 268, 304, 308, 323, 325, 327, 329, 341, 359, 369, 375, 379, 385, 390, 392, 396, 404, 412, 416, 420, 422, 425, 427, 432, 435, 443, 464, 466, 468, 472, 478, 484, 490, 522, 525, 531, 536, 540, 553, 555, 559, 563, 564, 586, 588, 593, 605, 607, 613, 615, 627, 635, 638, 652, 654, 658, 660, 661, 667, 671, 677, 679, 683, 688, 690, 692, 695, 699, 707, 708, 710, 714, 717, 726, 735, 737, 738, 743, 752, 760, 762, 778, 784, 790, 792, 796, 797, 801, 802, 807, 822, 829, 837, 842, 844, 851, 857, 863, 874, 876, 884, 888, 895, 897, 902, 906, 908, 912, 914, 919, 926, 944, 960, 964, 969, 973, 976, 978, 980, 989, 990, 999, 1002, 1004, 1005, 1012, 1014, 1025, 1029, 1032, 1033, 1034, 1045, 1057, 1059, 1060, 1062, 1064, 1072, 1080, 1090, 1096, 1098, 1110, 1124, 1133, 1135, 1137, 1156, 1166, 1175, 1178, 1179, 1182, 1191, 1195, 1202, 1207, 1208, 1218, 1220, 1232, 1238, 1251 and 1267 are differentially expressed in isolated CD45RO activated by anti-CD3/anti-CD28 as compared to: isolated resting CD45RO, isolated resting CD45RA and isolated CD45RA activated by anti-CD3/anti-CD28 cells. The nucleic acids and encoded PRO polypeptides as shown in SEQ ID NO:3, SEQ ID NO:588, SEQ ID NO:627, SEQ ID NO:677, SEQ ID NO:683, SEQ ID NO:714, SEQ ID NO:888, SEQ ID NO:1208, SEQ ID NO:1218 and SEQ ID NO:1232 are highly overexpressed in activated CD45RO compared to matched isolated resting CD45RO, isolated resting CD45RA cells and activated CD45RA cells.

### Example 7

### Microarray Analysis of Cytotoxic T Cells

[0342] CD8+ cells play central roles for organisms to defense viral infections and other intracellular pathogen infections. CD8+ cells also protect the host from various tumors. CD8+ cells in vivo can recognize tumor cells and initiate its killing machinery, such as releasing cytokines and granzymes, to eliminate tumor cells. Under different environments CD8+ could differentiate to different subtypes, namely Tc1 and Tc2. Tc1 cells produce high level IFN-g upon activation, while Tc2 cells, produce IL-4. In order to understand the function of CD8+ cells during activation and differentiation and identify potential therapeutic targets for viral infection, tumor, and autoimmune diseases, we performed gene expression analysis following different stages of CD8+ T cell activation and differentiation.

[0343] Nucleic acid microarrays, often containing thousands of gene sequences, are useful for identifying differentially expressed genes in diseased tissues as compared to their normal counterparts. Using nucleic acid microarrays, test and control mRNA samples from test and control tissue samples are reverse transcribed and labeled to generate cDNA probes. The cDNA probes are then hybridized to an array of nucleic acids immobilized on a solid support. The array is configured such that the sequence and position of each member of the array is known. For example, a selection of genes known to be expressed in certain disease states may be arrayed on a solid support. Hybridization of a labeled probe with a particular array member indicates that the sample from which the probe was derived expresses that gene. If the hybridization signal of a probe from a test (for example, activated CD8+ T cells) sample is greater than hybridization signal of a probe from a control (for example, non-stimulated CD8+ T cells) sample, the gene or genes overexpressed in the test tissue are identified. The implication of this result is that an overexpressed protein in a test tissue is useful not only as a diagnostic marker for the presence of the disease condition, but also as a therapeutic target for treatment of the disease condition.

[0344] The methodology of hybridization of nucleic acids and microarray technology is well known in the art. In one example, the specific preparation of nucleic acids for hybridization and probes, slides, and hybridization conditions are all detailed in PCT Patent Application Serial No. PCT/US01/10482, filed on Mar. 30, 2001 and which is herein incorporated by reference.

[0345] In this experiment, Peripheral blood CD+8 cells were isolated from leukopacks by negative selection using the Stem Cell Technologies CD8+ cell RossetteSep™ protocol from (Stem Cell Technologies, Vancouver BC) and further purified by the MACS magnetic cell sorting system using the CD8+ cell isolation kit and CD45RO microbeads were added to removed CD45RO cells (Miltenyi Biotec). CD8+ T cell purity was confirmed by staining with PE anti-CD8 for FACS analysis. Purity of cell preps ranged from 84% (one donor) to 96% (3 donors).

[0346] Isolated CD8+ T cells were cultured in 6 well plates 5 ml cultures/well at 4×10⁶ cells/mL using the culture conditions of: RPMI 1640, 10% heat inactivated FBS, 100 units/mL of Penicillin, 100 mg/mL of streptomycin, 2 mM L-glutamine. (for condition N1 and T0X) DMEM (high glucose), 10% heat inactivated FBS, 100 units/mL of Penicillin, 100 mg/mL of streptomycin, 2 mM L-glutamine, NEAA, and sodium pyruvate.

[0347] The experimental conditions to assay the effects of stimulation on isolated CD8+ cells was performed by the following conditions. At time 0 hrs (N0), RNA was isolated from isolated, untreated CD8(+) cells as a 0 timepoint.

[0348] Isolated CD8+ T cells were incubated for 16 hours with no stimulation (condition Tc0) in 3 mL of the media described above. Isolated CD8+ T cells were stimulated for 16 hours by anti-CD3 (10 ug/mL)+anti-CD28 (5 ug/mL) (conditions Tc1).

[0349] Isolated CD8+ T cells were stimulated for 16 hours by anti-CD3 and anti-CD28, plus IL-12, IFN-γ and anti-IL4 antibody (condition Tc2).

[0350] Isolated CD8+ T cells were stimulated for 16 hours by anti-CD3 and anti-CD28, plus IL-4, anti-IL12 antibody and anti-IFN-γ antibody (condition Tc3). All of the conditions above, activation of CD8 cells was monitored by FACS for cell surface expression of CD69 and CD25. RNA was harvested at the 16 hour time point for each condition.

[0351] After the 16 hour stimulation, the isolated CD8+ T cells were washed, and cultured for a further 48 hours with no stimulation. After this timepoint, cells were harvested and RNA was isolated (condition Tc0₄₈, Tc1₄₈, Tc2₄₈ Tc3₄₈). The cells that were not harvested at this timepoint/condition were expanded by adding fresh media and cultured for another 4 days, to make a total of 7 days in culture after the primary activation. Cells were harvested and RNA was isolated at this timepoint (condition Tc0₇, Tc1₇, Tc2₇ Tc3₇). After a total of 7 days in culture the isolated CD8+ T cells were washed and restimulated by anti-CD3 and anti-CD28 for 16 hours (condition Tc0₈, Tc1₈, Tc2₈ Tc3₈). Cells were harvested at this timepoint and RNA was isolated.

[0352] After 16 hours of stimulation, the cells were washed of stimulating factors and cultured for 48 hours (condition Tc0₁₀, Tc1₁₀, Tc2₁₀ Tc3₁₀). This is the final timepoint where cells were harvested and RNA isolated.

[0353] All RNA isolation was done by Qiagen miniprep and analysis run on Genentech and Affimax™ (Affymetrix Inc. Santa Clara, Calif.) microarray chips. Genes were compared whose expression was differentially expressed in activated (stimulated) vs. resting cells.

[0354] The Tc2 conditions are expected to be the most stimulatory, the anti-CD3/CD28 antibodies alone, will provide a level of activation (Tc1 conditions) but the addition of IFN-γ, IL-12 and anti-IL4 antibody synergizes the activation. The Tc3 conditions will show much less CD8+ T cell activation, as the antibodies listed are inhibitory to activation.

[0355] The results of this experiment are the nucleic acids and encoded PRO polypeptides as shown in SEQ ID NOs 1, 3, 7, 19, 25, 26, 36, 42, 44, 48, 50, 58, 66, 78, 82, 86, 99, 101, 103, 109, 123, 125, 131, 135, 142, 158, 162, 164, 168, 180, 188, 192, 200, 204, 210, 216, 242, 248, 256, 264, 268, 282, 292, 302, 306, 310, 321, 325, 327, 329, 341, 359, 375, 379, 385, 392, 396, 398, 404, 412, 416, 420, 422, 425, 427, 429, 432, 434, 441, 443, 445, 447, 455, 458, 464, 468, 472, 474, 484, 486, 490, 513, 522, 523, 525, 536, 540, 555, 557, 559, 563, 586, 588, 595, 609, 613, 615, 623, 640, 648, 652, 658, 661, 667, 675, 679, 683, 686, 688, 690, 692, 695, 699, 707, 710, 712, 714, 717, 735, 738, 743, 754, 765, 778, 784, 786, 788, 790, 792, 796, 807, 821, 822, 824, 838, 842, 851, 863, 874, 875, 884, 886, 888, 902, 904, 906, 908, 912, 926, 928, 969, 976, 980, 985, 989, 990, 996, 999, 1005, 1012, 1014, 1021, 1029, 1032, 1034, 1036, 1038, 1042, 1054, 1056, 1059, 1060, 1062, 1064, 1070, 1072, 1080, 1090, 1098, 1114, 1124, 1129, 1131, 1133, 1135, 1137, 1143, 1156, 1164, 1166, 1175, 1179, 1195, 1200, 1207, 1208, 1218, 1232, 1238, 1253, 1265, 1268 and 1269 show differential expression upon stimulation with anti-CD3/CD28/IL-4 and IL-12/IFN-γ (condition Tc2ₓ) as compared to isolated resting CD8+ T cells. The nucleic acids and encoded PRO polypeptides as shown in SEQ ID NO:58, SEQ ID NO:123, SEQ ID NO:379, SEQ ID NO:648, SEQ ID NO:658, SEQ ID NO:714, SEQ ID NO:824, SEQ ID NO:1005, SEQ ID NO:1062 and SEQ ID NO:1269 are highly overexpressed in isolated CD8+ T cells activated by anti-CD3/CD28/IL-4 and IL-12/IFN-γ as compared to isolated resting CD8+ T cells.

### Example 8

### Microarray Analysis of Stimulated B-Cells

[0356] The B lymphocytes play a major role in the humoral immune response as the antibody producing cells. The B cells can generate a highly diverse antibody repertoire that is reactive to almost all potential antigens. Through a process of maturation and clonal selection in the bone marrow, a highly diverse B cell population develops with each B cell clone expressing an antigen specific cell surface receptor, the B cell receptor (BCR), which bear the same specificity as the secreted antibody made by the B cell. These mature cells are involved in immunity against foreign and infectious agents, as well as autoimmunity, whereby they produce autoantibodies against self constituents.

[0357] The BCR complex on mature cells is composed of membrane IgM and IgD molecules associated with the invariant Igα and Igβ heterodimers, which contain two immunoreceptor tyrosine-based activation motifs (ITAM) in their cytoplasmic tails. Mature BCR bearing B cells seed the peripheral blood and recirculate through the primary lymphoid tissues, such as the lymph nodes, spleen, and mucosal lymphoid tissues. Cross-linking of membrane Ig by multivalent antigen triggers clustering of the Igα and Igβ heterodimers and leads to tyrosine phosphorylation of the ITAMs by the SRC-family protein tyrosine kinases (PTKs), such as Lyn, Fyn, Blk, and Lck. Since the BCR complex lacks intrinsic kinase activity and is believed excluded from lipid rafts in the membrane, oligomerized BCR are translocated to lipid rafts, where Lyn resides constitutively to mediate tyrosine phosphorylation of the ITAM domains. This BCR signaling process is dependent on a receptor-inducible assembly mechanism, associated with the recruitment of PTKs, adaptors or linker proteins, and effector enzymes to the cytoplasmic side of the plasma membrane. The linker proteins, such as BLNK, BCAP, GAB, PAG, and LAT help localize enzymatic complexes to the appropriate subcellular site for signaling. These linker proteins link cell surface receptors with effector enzymes and help modulate signal transduction by mediating protein-protein or protein-lipid interactions.

[0358] The stimulation of B cells with anti-CD40 can mimic B cell activation via BCR. CD40 ligation has been shown to induce B cell growth, survival, differentiation, Ig switching, germinal center formation, and enhancement of antigen presentation by B cells. CD40 ligation not only enhances the expression of PIM-1, a protooncogene that encodes a serine/threonine protein kinase, via NF-κB activation, but stimulates JNK, p38 kinases, and protein kinase C independent activation of ERK2, similar to stimulation of B cells with anti-IgM. CD40 ligation also induces phosphorylation of tyrosine kinases Lyn, Fyn, and Syk. The combination of IL-4 and anti-CD40 stimulation leads to enhanced B cell proliferation and Ig secretion. Therefore, a microarray experiment comparing differential expression of RNA from anti-CD40 and IL-4 stimulated vs resting B cells, can reveal new genes associated with B cell activation. Gene products associated with B cell activation can be targets for therapeutic drug development in the treatment of autoimmune mediated inflammatory diseases and B cell malignancies, as well as provide insights into genes that are defective in immune deficiency disorders.

[0359] Nucleic acid microarrays, often containing thousands of gene sequences, are useful for identifying differentially expressed genes in diseased tissues as compared to their normal counterparts. Using nucleic acid microarrays, test and control mRNA samples from test and control tissue samples are reverse transcribed and labeled to generate cDNA probes. The cDNA probes are then hybridized to an array of nucleic acids immobilized on a solid support. The array is configured such that the sequence and position of each member of the array is known. For example, a selection of genes known to be expressed in certain disease states may be arrayed on a solid support. Hybridization of a labeled probe with a particular array member indicates that the sample from which the probe was derived expresses that gene. If the hybridization signal of a probe from a test (in this example, stimulated B cells) sample is greater than hybridization signal of a probe from a control (in this instance, non-stimulated B cells) sample, the gene or genes overexpressed in the test tissue are identified. The implication of this result is that an overexpressed protein in a test tissue is useful not only as a diagnostic marker for the presence of the disease condition, but also as a therapeutic target for treatment of the disease condition.

[0360] The methodology of hybridization of nucleic acids and microarray technology is well known in the art. In one example, the specific preparation of nucleic acids for hybridization and probes, slides, and hybridization conditions are all detailed in PCT Patent Application Serial No. PCT/US01/10482, filed on Mar. 30, 2001 and which is herein incorporated by reference.

[0361] In this experiment, primary B cells were isolated from peripheral blood provided by 3 normal male donors. B cells were isolated by negative selection using the B Cell Isolation Kit with the MACS™ magnetic cell sorting system (Miltenyi Biotec, Auburn Calif.). The cell purity was determined by fluorescence antibody staining with anti-CD19 vs isotype antibody control and subsequent FACS analysis to determine purity. The purity of the B cell population was above 90% for each donor.

[0362] The isolated cells were suspended in RPMI1640 media supplemented with 10% FBS, 2 mM L-glutamine, 55 mM 2-ME, 100 units/mL of Penicillin, 100 mg/mL of streptomycin. Cells were cultured at a density of 3×10⁵ cells/mL in 5 mL/well in 6 well FALCON™ polystyrene tissue culture plates. Cells were cultured for 23 hours at 37° C. either in the presence and absence of anti-CD40 (10 mg/mL) and IL-4 (100 ng/mL). The immune competence of the isolated B cells to respond to stimulation by anti-CD40/IL-4 was determined by induction of expression of the cell surface protein, CD69. The increase in expression of CD69 was monitored at a 0 timepoint and 23 hours after culture with anti-CD40/IL-4, using fluorescence staining with anti-CD69 antibodies.

[0363] Total RNA was extracted from the cultured B cells at the 0 timepoint and at 23 hours with and without the anti-CD40/IL-4 stimulation using the Qiagen Rneasy Maxi Kit™. The RNA was extracted from columns treated with DNAse I as per Qiagen protocol and eluted using DEPC treated water. The extracted RNA was run on Affimax (Affymetrix Inc. Santa Clara, Calif.) microarrays. Non-stimulated cells harvested at the 0 timepoint were subjected to the same analysis. Genes were compared whose expression was upregulated at the 23 hour timepoint in stimulated vs. non-stimulated cells.

[0364] The results of these experiments demonstrate that the nucleic acids and encoded PRO polypeptides as shown in SEQ ID NOs.: 9, 28, 48, 50, 56, 58, 74, 82, 101, 117, 131, 135, 160, 170, 176, 178, 204, 208, 228, 246, 270, 278, 321, 323, 331, 365, 383, 386, 392, 400, 435, 458, 484, 492, 498, 515, 525, 549, 591, 597, 652, 661, 663, 669, 677, 686, 714, 715, 728, 750, 771, 780, 782, 794, 796, 834, 845, 866, 900, 919, 941, 1016, 1021, 1032, 1051, 1052, 1058, 1098, 1131, 1150, 1173, 1208, 1255, 1257, 1265, 1267 and 1271 are differentially expressed in B cells upon stimulation with anti-CD40/IL-4.

[0365] Furthermore, the results of these experiments demonstrate that the nucleic acids and encoded PRO polypeptides as shown in SEQ ID NO:39, SEQ ID NO:72, SEQ ID NO:91, SEQ ID NO:114, SEQ ID NO:149, SEQ ID NO:196, SEQ ID NO:198, SEQ ID NO:206, SEQ ID NO:208 and SEQ ID NO:212 are highly overexpressed in B cells upon stimulation with anti-CD40/IL-4.

### Example 9

### Expression of PRO in NK Cells

[0366] Natural killer (NK) cells are an important effector cell of the innate immune system. They are specialized to effect killing against host cells that have either been infected by viruses, parasites or that have become cancerous. Phenotypically, NK cells are large granular lymphocytes that constitute ˜2% of the circulating lymphocyte population. They are commonly identified by cell surface expression of CD56 and CD 16. They mature in the bone marrow from a CD34+ precursor cell that they share with T cells. The mature NK cell, shares expression of CD8, cytolytic machinery, and some KIRs, with T cells, but remains distinct from T cells by the lack of CD3 and the T cell receptors. Like cytotoxic T cells, they contain granules filled with pore forming protein, cytotoxins, serine esterases and proteoglycans that mediate lysis of target cells. Both cytotoxic T cells and NK cells kill on contact by binding to their targets and delivering their lethal burst of chemicals that produces holes in the target cell's membrane. Unlike cytotoxic T cells, NK cells do not need to recognize a specific antigen before initiating lysis. Rather, NK cell activation can be mediated by growth factors and cytokines (in particular, IL-2, IL-12 and IL-15 have been shown to mediate proliferative and cytotoxic activities or by a delicate balance between two classes of NK cell receptors, one that activates the cells, and another that inhibits. Killer Ig-like receptors (KIRS) are NK cell receptors that transmit an inhibitory signal if they encounter class I MHC molecules on a cell surface. This is important for killing of both cancerous cells and virally infected cells. Because viruses often suppress class I MHC expression in cells they infect, the virus-infected cell becomes susceptible to killing by NK cells. Likewise, cancer cells have reduced or no class I MHC expression and they, too, become susceptible to killing by NK cells. Natural cytotoxicity receptors (NCRs) constitute a family of activating receptors on NK cells. In some effector-target systems, the surface density of NCRs correlates with the cytolytic activity of the NK cells, while in other systems killing requires cooperation between NCR, another activating receptor NKG2D and its adaptor polypeptide DAP10. Additionally, the strength of the signals can be influenced by engagement of coreceptors such as 2B4 and NTB-A. The ligands for NCRs and NKG2D, hemoglutanins and MICA, MICB respectively are not expressed by most normal cells, but are induced in most tumor cell lines. Expression of the ligands by tumor cells triggers a dramatic immune response resulting in tumor cell rejection. Activation of NK cells with IL-15 or IL-12 have been shown to induce both cytotoxic and proliferative effects. Junctional adhesion molecule 2 (JAM2) has been shown to bind to NK cells and has been hypothesized to play a role in lymphocyte extravasation to sites of inflammation.

[0367] Therefore, a DNA microarray experiment comparing differential expression of genes from these three modes of activation versus resting NK cells has the potential to reveal novel genes or novel gene associations with NK cell activity. Therapeutic antibodies, peptides or small molecules could be developed to target specific genes revealed by these microarrays for the treatment of immune mediated inflammatory diseases and malignancies. Peripheral blood NK cells were isolated from leukopacks by negative selection using the NK cell isolation kit with the MACS™ magnetic cell sorting system (Miltenyi Biotec). Cell purity was confirmed by staining with PE anti-CD56 for FACS analysis. Purity of cell preps ranged from 89% to 96%. Cell culture: Set up in-vitro cultures in 6 well plates 5 ml cultures/well. Media: RPMI 1640, 10% heat inactivated FBS, 100 units/mL of Penicillin, 100 mg/mL of streptomycin, 2 mM L-glutamine, and 5.5×10-5 Beta-mercaptoethanol. Experimental treatments: Time 0 hrs, Untreated CD56(+) cells. Time 16 hrs. Untreated, IL2 (10 nM), IL15(10 nM), JAM-IT(10 nM) stimulated. Activation of NK cells was monitored by FACS for cell surface expression of CD56 and CD69.

[0368] The results of these experiments demonstrate that the nucleic acids and encoded PRO polypeptides as shown in SEQ ID NOs.: 5, 28, 30, 44, 48, 58, 97, 142, 164, 188, 254, 292, 296, 308, 327, 379, 417, 443, 462, 468, 472, 484, 522, 523, 555, 559, 588, 627, 638, 737, 738, 740, 780, 807, 840, 850, 990, 1005, 1034, 1064, 1098, 1124, 1196 and 1234.

[0369] Furthermore, this series of experiments determined that the nucleotide sequences and their encoded PRO polypeptides as shown in SEQ ID NO:44, SEQ ID NO:58, SEQ ID NO:308, SEQ ID NO:327, SEQ ID NO:379, SEQ ID NO:627, SEQ ID NO:738, SEQ ID NO:780, SEQ ID NO:1005 and SEQ ID NO:1034 are highly overexpressed in CD56+ NK cells, when compared with normal resting NK cells.

### Example 10

### Microarray Analysis of Monocyte/Macrophages

[0370] Macrophages represent an ubiquitously distributed population of fixed and circulating mononuclear phagocytes that express a variety of functions including cytokine production, killing of microbes and tumor cells and processing and presentation of antigens. Macrophages originate in the bone marrow from stem cells that give rise to a bipotent granulocyte/macrophage cell population. Distinct granulocyte and macrophage colony forming cell lineages arise from GM-CSF under the influence of specific cytokines. Upon division, monoblasts give rise to promonocytes and monocytes in the bone marrow. From there, monocytes enter the circulation. In response to particular stimuli (e.g. infection or foreign bodies) monocytes migrate into tissues and organs where they differentiate into macrophages.

[0371] Macrophages in various tissues vary in their morphology and function and have been assigned different names, e.g. Kupffer cells in the liver, pulmonary and alveolar macrophages in the lung and microglial cells in the central nervous system. However, the relationship between blood monocytes and tissue macrophages remains unclear.

[0372] In the present study monocytes were differentiated into macrophages by adherence to plastic in the presence of a combination of human and bovine serum. After 7 days in culture, monocytes-derived macrophages display features typical of differentiated tissue macrophages including their ability to phagocytose opsonized particles, secretion of TNF-alpha upon lipopolysaccharide (LPS) stimulation, formation of processes and the presence of macrophage cell surface markers.

[0373] Using microarray technologies, gene transcripts from non-differentiated monocytes harvested before adhering were compared with those at 1 day and 7 days in culture. Genes selectively expressed in monocytes or macrophages could be used for the diagnosis and treatment of various chronic inflammatory or autoimmune diseases in the human. In particular, surface expressed molecules or transmembrane receptors involved in monocyte/macrophage adhesion and endothelial cell transmigration could provide novel targets to treat chronic inflammation by interference with the homing of these cells to the site of inflammation. In addition, transmembrane inhibitory receptors could be used to down-regulate monocyte/macrophage effector functions. Therapeutic molecules can be antibodies, peptides, fusion proteins or small molecules. Nucleic acid microarrays, often containing thousands of gene sequences, are useful for identifying differentially expressed genes in diseased tissues as compared to their normal counterparts. Using nucleic acid microarrays, test and control mRNA samples from test and control tissue samples are reverse transcribed and labeled to generate cDNA probes. The cDNA probes are then hybridized to an array of nucleic acids immobilized on a solid support. The array is configured such that the sequence and position of each member of the array is known. For example, a selection of genes known to be expressed in certain disease states may be arrayed on a solid support. Hybridization of a labeled probe with a particular array member indicates that the sample from which the probe was derived expresses that gene. If the hybridization signal of a probe from a test (in this instance, differentiated macrophages) sample is greater than hybridization signal of a probe from a control (in this instance, non-differentiated monocytes) sample, the gene or genes expressed in the test tissue are identified. The implication of this result is that an overexpressed protein in a test tissue is useful not only as a diagnostic marker for the presence of the disease condition, but also as a therapeutic target for treatment of the disease condition.

[0374] The methodology of hybridization of nucleic acids and microarray technology is well known in the art. In one example, the specific preparation of nucleic acids for hybridization and probes, slides, and hybridization conditions are all detailed in PCT Patent Application Serial No. PCT/US01/10482, filed on Mar. 30, 2001 and which is herein incorporated by reference.

[0375] In this experiment, CD 14+ monocytes are selected by positive selection according to Miltenyi MACS™ protocol. Lymphocytes in 100 ml heparinized blood are separated using Ficoll Paque™. Cells are washed twice in PBS/0.5% BSA/2 mM EDTA. In final wash, all gradients are pooled and volume is brought to approximately 10 ml. The cells are centrifuged, the supernatant is removed and the cell pellet is resuspended in buffer in a total volume of 10e7 cells per 80 μl buffer. Add 20 Ξl CD14 microbeads per 10e7 total cells, mix and incubate 15 minutes at 6-12° C. Wash the cells by adding 20× labeling volume of buffer, spin pellet and resuspend in 500 ul buffer per 10e8 cells. Separate cells with MACS™ depletion column type D and check purity of cells by labeling with anti-CD45 and anti-CD14 antibodies (cell purity at this point is >95%). Lyse cells in RNA lysis buffer to obtain a timepoint of Day 0 monocytes, then plate remaining cells in 6 well plates in macrophage differentiation medium: DMEM 4.5 ug/ml glucose, Pen-Strep, L-glutamine, 20% FBS and 10% Human AB serum (Gemini, Cat #100-512). Seed cells at 1.5×10e6 per well (6 well Costar cell culture plates) and grow at 37° C., 7% CO₂. After 24 hours in culture, the cells were harvested and lysed in RNA lysis buffer to obtain mRNA for the Day 1 timepoint. The remaining cells were kept in culture and until Day 7. After 7 days in culture, the cells were lysed in RNA lysis buffer to obtain Day 7 timepoint at which time the cells displayed gross macrophage morphology.

[0376] The mRNA was isolated by Qiagen miniprep and analysis run on Affimax™ (Affymetrix Inc. Santa Clara, Calif.) microarray chips and proprietary Genentech microarrays. The cells harvested at Day 0 timepoint, the Day 1 timepoint, and the Day 7 timepoint were subjected to the same analysis. Genes were compared whose expression was upregulated at Day 7 as compared to Day 0 and Day 1.

[0377] In this series of experiments it was determined that the nucleic acids and encoded proteins as shown in SEQ ID NOs and the encoded PRO polypeptide of SEQ ID NOs.: 3, 5, 7, 9, 13, 23, 26, 28, 30, 32, 34, 40, 42, 44, 46, 48, 50, 52, 54, 56, 58, 60, 64, 66, 67, 69, 71, 72, 74, 76, 78, 80, 82, 84, 86, 88, 90, 92, 94, 96, 97, 99, 101, 103, 107, 109, 111, 113, 115, 117, 119, 121, 123, 125, 127, 131, 133, 135, 137, 139, 141, 142, 144, 146, 148, 150, 152, 154, 156, 160, 162, 164, 166, 170, 172, 174, 176, 182, 184, 186, 192, 196, 198, 202, 204, 208, 212, 214, 216, 218, 220, 222, 224, 228, 230, 232, 238, 240, 242, 244, 250, 252, 258, 260, 264, 266, 270, 272, 280, 284, 286, 288, 292, 294, 296, 298, 302, 306, 308, 314, 315, 317, 321, 325, 329, 335, 337, 341, 343, 349, 351, 353, 355, 357, 359, 361, 363, 365, 369, 375, 377, 379, 381, 385, 386, 388, 390, 392, 394, 398, 400, 402, 404, 409, 411, 412, 414, 417, 418, 422, 423, 425, 432, 437, 439, 441, 448, 451, 456, 458, 464, 466, 468, 470, 472, 474, 480, 482, 484, 486, 490, 492, 496, 504, 507, 509, 511, 513, 515, 517, 520, 522, 531, 533, 535, 536, 538, 546, 549, 551, 553, 555, 557, 559, 564, 566, 570, 578, 580, 582, 584, 586, 589, 593, 595, 599, 601, 603, 607, 615, 617, 621, 625, 629, 633, 635, 640, 644, 646, 652, 654, 660, 661, 663, 665, 669, 673, 675, 677, 683, 685, 686, 688, 690, 692, 694, 697, 699, 701, 707, 708, 710, 712, 714, 719, 721, 726, 728, 730, 733, 735, 737, 738, 743, 744, 752, 754, 756, 759, 760, 762, 764, 767, 773, 775, 776, 778, 780, 782, 784, 786, 790, 792, 794, 796, 803, 804, 806, 807, 813, 815, 817, 822, 827, 830, 832, 834, 837, 838, 842, 845, 847, 849, 850, 853, 855, 859, 861, 863, 865, 866, 867, 870, 872, 874, 878, 880, 882, 884, 886, 888, 890, 895, 897, 900, 903, 904, 906, 907, 910, 916, 917, 919, 923, 925, 926, 930, 935, 936, 938, 940, 948, 951, 952, 960, 962, 965, 967, 969, 971, 973, 974, 980, 982, 985, 989, 990, 999, 1001, 1002, 1007, 1008, 1010, 1012, 1014, 1017, 1019, 1023, 1025, 1030, 1032, 1033, 1034, 1038, 1040, 1046, 1050, 1051, 1054, 1056, 1057, 1059, 1060, 1062, 1064, 1066, 1068, 1070, 1072, 1074, 1076, 1078, 1080, 1082, 1084, 1086, 1090, 1092, 1094, 1098, 1104, 1106, 1114, 1116, 1118, 1120, 1122, 1124, 1126, 1128, 1133, 1135, 1137, 1141, 1144, 1148, 1150, 1152, 1154, 1156, 1164, 1166, 1168, 1170, 1171, 1173, 1175, 1177, 1178, 1179, 1181, 1182, 1184, 1186, 1188, 1190, 1191, 1193, 1196, 1198, 1205, 1207, 1208, 1209, 1210, 1212, 1214, 1216, 1220, 1221, 1222, 1225, 1229, 1230, 1234, 1236, 1244, 1245, 1246, 1248, 1253, 1255, 1257, 1258, 1260, 1261, 1263, 1265 and 1271 are differentially expressed in monocytes, when compared with normal undifferentiated monocytes. The nucleic acids and encoded PRO polypeptides as shown in SEQ ID NO:72, SEQ ID NO:107, SEQ ID NO:119, SEQ ID NO:232, SEQ ID NO:398, SEQ ID NO:400, SEQ ID NO:701, SEQ ID NO:872, SEQ ID NO:1154 and SEQ ID NO:1164 are highly overexpressed in differentiated monocytes as opposed to undifferentiated control cells.

### Example 11

### Use of PRO as a Hybridization Probe

[0378] The following method describes use of a nucleotide sequence encoding PRO as a hybridization probe.

[0379] DNA comprising the coding sequence of full-length or mature PRO as disclosed herein is employed as a probe to screen for homologous DNAs (such as those encoding naturally-occurring variants of PRO) in human tissue cDNA libraries or human tissue genomic libraries.

[0380] Hybridization and washing of filters containing either library DNAs is performed under the following high stringency conditions. Hybridization of radiolabeled PRO-derived probe to the filters is performed in a solution of 50% formamide, 5×SSC, 0.1% SDS, 0.1% sodium pyrophosphate, 50 mM sodium phosphate, pH 6.8, 2×Denhardt's solution, and 10% dextran sulfate at 42° C. for 20 hours. Washing of the filters is performed in an aqueous solution of 0.1×SSC and 0.1% SDS at 42° C.

[0381] DNAs having a desired sequence identity with the DNA encoding full-length native sequence PRO can then be identified using standard techniques known in the art.

### Example 12

### Expression of PRO in E. Coli

[0382] This example illustrates preparation of an unglycosylated form of PRO by recombinant expression in E. coli.

[0383] The DNA sequence encoding PRO is initially amplified using selected PCR primers. The primers should contain restriction enzyme sites which correspond to the restriction enzyme sites on the selected expression vector. A variety of expression vectors may be employed. An example of a suitable vector is pBR322 (derived from E. coli; see Bolivar et al., Gene, 2:95 (1977)) which contains genes for ampicillin and tetracycline resistance. The vector is digested with restriction enzyme and dephosphorylated. The PCR amplified sequences are then ligated into the vector. The vector will preferably include sequences which encode for an antibiotic resistance gene, a trp promoter, a polyhis leader (including the first six STII codons, polyhis sequence, and enterokinase cleavage site), the PRO coding region, lambda transcriptional terminator, and an argU gene.

[0384] The ligation mixture is then used to transform a selected E. coli strain using the methods described in Sambrook et al., supra. Transformants are identified by their ability to grow on LB plates and antibiotic resistant colonies are then selected. Plasmid DNA can be isolated and confirmed by restriction analysis and DNA sequencing.

[0385] Selected clones can be grown overnight in liquid culture medium such as LB broth supplemented with antibiotics. The overnight culture may subsequently be used to inoculate a larger scale culture. The cells are then grown to a desired optical density, during which the expression promoter is turned on.

[0386] After culturing the cells for several more hours, the cells can be harvested by centrifugation. The cell pellet obtained by the centrifugation can be solubilized using various agents known in the art, and the solubilized PRO protein can then be purified using a metal chelating column under conditions that allow tight binding of the protein.

[0387] PRO may be expressed in E. coli in a poly-His tagged form, using the following procedure. The DNA encoding PRO is initially amplified using selected PCR primers. The primers will contain restriction enzyme sites which correspond to the restriction enzyme sites on the selected expression vector, and other useful sequences providing for efficient and reliable translation initiation, rapid purification on a metal chelation column, and proteolytic removal with enterokinase. The PCR-amplified, poly-His tagged sequences are then ligated into an expression vector, which is used to transform an E. coli host based on strain 52 (W3110 fuhA(tonA) lon gale rpoHts(htpRts) clpP(lacIq). Transformants are first grown in LB containing 50 mg/ml carbenicillin at 30° C. with shaking until an O.D.600 of 3-5 is reached. Cultures are then diluted 50-100 fold into CRAP media (prepared by mixing 3.57 g (NH₄)₂SO₄, 0.71 g sodium citrate.2H2O, 1.07 g KCl, 5.36 g Difco yeast extract, 5.36 g Sheffield hycase SF in 500 mL water, as well as 110 mM MPOS, pH 7.3, 0.55% (w/v) glucose and 7 mM MgSO₄) and grown for approximately 20-30 hours at 30° C. with shaking. Samples are removed to verify expression by SDS-PAGE analysis, and the bulk culture is centrifuged to pellet the cells. Cell pellets are frozen until purification and refolding.

[0388] E. coli paste from 0.5 to 1 L fermentations (6-10 g pellets) is resuspended in 10 volumes (w/v) in 7 M guanidine, 20 mM Tris, pH 8 buffer. Solid sodium sulfite and sodium tetrathionate is added to make final concentrations of 0.1M and 0.02 M, respectively, and the solution is stirred overnight at 4° C. This step results in a denatured protein with all cysteine residues blocked by sulfitolization. The solution is centrifuged at 40,000 rpm in a Beckman Ultracentifuge for 30 min. The supernatant is diluted with 3-5 volumes of metal chelate column buffer (6 M guanidine, 20 mM Tris, pH 7.4) and filtered through 0.22 micron filters to clarify. The clarified extract is loaded onto a 5 ml Qiagen Ni-NTA metal chelate column equilibrated in the metal chelate column buffer. The column is washed with additional buffer containing 50 mM imidazole (Calbiochem, Utrol grade), pH 7.4. The protein is eluted with buffer containing 250 mM imidazole. Fractions containing the desired protein are pooled and stored at 4° C. Protein concentration is estimated by its absorbance at 280 nm using the calculated extinction coefficient based on its amino acid sequence.

[0389] The proteins are refolded by diluting the sample slowly into freshly prepared refolding buffer consisting of: 20 mM Tris, pH 8.6, 0.3 M NaCl, 2.5 M urea, 5 mM cysteine, 20 mM glycine and 1 mM EDTA. Refolding volumes are chosen so that the final protein concentration is between 50 to 100 micrograms/ml. The refolding solution is stirred gently at 4° C. for 12-36 hours. The refolding reaction is quenched by the addition of TFA to a final concentration of 0.4% (pH of approximately 3). Before further purification of the protein, the solution is filtered through a 0.22 micron filter and acetonitrile is added to 2-10% final concentration. The refolded protein is chromatographed on a Poros R1/H reversed phase column using a mobile buffer of 0.1% TFA with elution with a gradient of acetonitrile from 10 to 80%. Aliquots of fractions with A280 absorbance are analyzed on SDS polyacrylamide gels and fractions containing homogeneous refolded protein are pooled. Generally, the properly refolded species of most proteins are eluted at the lowest concentrations of acetonitrile since those species are the most compact with their hydrophobic interiors shielded from interaction with the reversed phase resin. Aggregated species are usually eluted at higher acetonitrile concentrations. In addition to resolving misfolded forms of proteins from the desired form, the reversed phase step also removes endotoxin from the samples.

[0390] Fractions containing the desired folded PRO polypeptide are pooled and the acetonitrile removed using a gentle stream of nitrogen directed at the solution. Proteins are formulated into 20 mM Hepes, pH 6.8 with 0.14 M sodium chloride and 4% mannitol by dialysis or by gel filtration using G25 Superfine (Pharmacia) resins equilibrated in the formulation buffer and sterile filtered.

[0391] Many of the PRO polypeptides disclosed herein were successfully expressed as described above.

### Example 13

### Expression of PRO in Mammalian Cells

[0392] This example illustrates preparation of a potentially glycosylated form of PRO by recombinant expression in mammalian cells.

[0393] The vector, pRK5 (see EP 307,247, published Mar. 15, 1989), is employed as the expression vector. Optionally, the PRO DNA is ligated into pRK5 with selected restriction enzymes to allow insertion of the PRO DNA using ligation methods such as described in Sambrook et al., supra. The resulting vector is called pRK5-PRO.

[0394] In one embodiment, the selected host cells may be 293 cells. Human 293 cells (ATCC CCL 1573) are grown to confluence in tissue culture plates in medium such as DMEM supplemented with fetal calf serum and optionally, nutrient components and/or antibiotics. About 10 μg pRK5-PRO DNA is mixed with about 1 μg DNA encoding the VA RNA gene [Thimmappaya et al., Cell, 31:543 (1982)] and dissolved in 500 μl of 1 mM Tris-HCl, 0.1 mM EDTA, 0.227 M CaCl₂. To this mixture is added, dropwise, 500 μl of 50 mM HEPES (pH 7.35), 280 mM NaCl, 1.5 mM NaPO₄, and a precipitate is allowed to form for 10 minutes at 25° C. The precipitate is suspended and added to the 293 cells and allowed to settle for about four hours at 37° C. The culture medium is aspirated off and 2 ml of 20% glycerol in PBS is added for 30 seconds. The 293 cells are then washed with serum free medium, fresh medium is added and the cells are incubated for about 5 days.

[0395] Approximately 24 hours after the transfections, the culture medium is removed and replaced with culture medium (alone) or culture medium containing 200 μCi/ml ³⁵S-cysteine and 200 μCi/ml ³⁵S-methionine. After a 12 hour incubation, the conditioned medium is collected, concentrated on a spin filter, and loaded onto a 15% SDS gel. The processed gel may be dried and exposed to film for a selected period of time to reveal the presence of PRO polypeptide. The cultures containing transfected cells may undergo further incubation (in serum free medium) and the medium is tested in selected bioassays.

[0396] In an alternative technique, PRO may be introduced into 293 cells transiently using the dextran sulfate method described by Somparyrac et al., Proc. Natl. Acad. Sci., 12:7575 (1981). 293 cells are grown to maximal density in a spinner flask and 700 μg pRK5-PRO DNA is added. The cells are first concentrated from the spinner flask by centrifugation and washed with PBS. The DNA-dextran precipitate is incubated on the cell pellet for four hours. The cells are treated with 20% glycerol for 90 seconds, washed with tissue culture medium, and re-introduced into the spinner flask containing tissue culture medium, 5 μg/ml bovine insulin and 0.1 μg/ml bovine transferrin. After about four days, the conditioned media is centrifuged and filtered to remove cells and debris. The sample containing expressed PRO can then be concentrated and purified by any selected method, such as dialysis and/or column chromatography.

[0397] In another embodiment, PRO can be expressed in CHO cells. The pRK5-PRO can be transfected into CHO cells using known reagents such as CaPO₄ or DEAE-dextran. As described above, the cell cultures can be incubated, and the medium replaced with culture medium (alone) or medium containing a radiolabel such as ³⁵S-methionine. After determining the presence of PRO polypeptide, the culture medium may be replaced with serum free medium. Preferably, the cultures are incubated for about 6 days, and then the conditioned medium is harvested. The medium containing the expressed PRO can then be concentrated and purified by any selected method.

[0398] Epitope-tagged PRO may also be expressed in host CHO cells. The PRO may be subcloned out of the pRK5 vector. The subclone insert can undergo PCR to fuse in frame with a selected epitope tag such as a poly-his tag into a Baculovirus expression vector. The poly-his tagged PRO insert can then be subcloned into a SV40 promoter/enhancer containing vector containing a selection marker such as DHFR for selection of stable clones. Finally, the CHO cells can be transfected (as described above) with the SV40 promoter/enhancer containing vector. Labeling may be performed, as described above, to verify expression. The culture medium containing the expressed poly-His tagged PRO can then be concentrated and purified by any selected method, such as by Ni²⁺-chelate affinity chromatography.

[0399] PRO may also be expressed in CHO and/or COS cells by a transient expression procedure or in CHO cells by another stable expression procedure.

[0400] Stable expression in CHO cells is performed using the following procedure. The proteins are expressed as an IgG construct (immunoadhesin), in which the coding sequences for the soluble forms (e.g. extracellular domains) of the respective proteins are fused to an IgG1 constant region sequence containing the hinge, CH2 and CH2 domains and/or is a poly-His tagged form.

[0401] Following PCR amplification, the respective DNAs are subcloned in a CHO expression vector using standard techniques as described in Ausubel et al., Current Protocols of Molecular Biology, Unit 3.16, John Wiley and Sons (1997). CHO expression vectors are constructed to have compatible restriction sites 5′ and 3′ of the DNA of interest to allow the convenient shuttling of cDNA's. The vector used expression in CHO cells is as described in Lucas et al., Nucl. Acids Res. 24:9 (1774-1779 (1996), and uses the SV40 early promoter/enhancer to drive expression of the cDNA of interest and dihydrofolate reductase (DHFR). DHFR expression permits selection for stable maintenance of the plasmid following transfection.

[0402] Twelve micrograms of the desired plasmid DNA is introduced into approximately 10 million CHO cells using commercially available transfection reagents Superfect® (Quiagen), Dosper® or Fugene® (Boehringer Mannheim). The cells are grown as described in Lucas et al., supra. Approximately 3×10⁻⁷ cells are frozen in an ampule for further growth and production as described below.

[0403] The ampules containing the plasmid DNA are thawed by placement into water bath and mixed by vortexing. The contents are pipetted into a centrifuge tube containing 10 mL of media and centrifuged at 1000 rpm for 5 minutes. The supernatant is aspirated and the cells are resuspended in 10 mL of selective media (0.2 μm filtered PS20 with 5% 0.2 μm diafiltered fetal bovine serum). The cells are then aliquoted into a 100 mL spinner containing 90 mL of selective media. After 1-2 days, the cells are transferred into a 250 mL spinner filled with 150 mL selective growth medium and incubated at 37° C. After another 2-3 days, 250 mL, 500 mL and 2000 mL spinners are seeded with 3×10⁵ cells/mL. The cell media is exchanged with fresh media by centrifugation and resuspension in production medium. Although any suitable CHO media may be employed, a production medium described in U.S. Pat. No. 5,122,469, issued Jun. 16, 1992 may actually be used. A 3 L production spinner is seeded at 1.2×10⁶ cells/mL. On day 0, pH is determined. On day 1, the spinner is sampled and sparging with filtered air is commenced. On day 2, the spinner is sampled, the temperature shifted to 33° C., and 30 mL of 500 g/L glucose and 0.6 mL of 10% antifoam (e.g., 35% polydimethylsiloxane emulsion, Dow Corning 365 Medical Grade Emulsion) taken. Throughout the production, the pH is adjusted as necessary to keep it at around 7.2. After 10 days, or until the viability dropped below 70%, the cell culture is harvested by centrifugation and filtering through a 0.22 μm filter. The filtrate was either stored at 4° C. or immediately loaded onto columns for purification.

[0404] For the poly-His tagged constructs, the proteins are purified using a Ni-NTA column (Qiagen). Before purification, imidazole is added to the conditioned media to a concentration of 5 mM. The conditioned media is pumped onto a 6 ml Ni-NTA column equilibrated in 20 mM Hepes, pH 7.4, buffer containing 0.3 M NaCl and 5 mM imidazole at a flow rate of 4-5 ml/min. at 4° C. After loading, the column is washed with additional equilibration buffer and the protein eluted with equilibration buffer containing 0.25 M imidazole. The highly purified protein is subsequently desalted into a storage buffer containing 10 mM Hepes, 0.14 M NaCl and 4% mannitol, pH 6.8, with a 25 ml G25 Superfine (Pharmacia) column and stored at −80° C.

[0405] Immunoadhesin (Fc-containing) constructs are purified from the conditioned media as follows. The conditioned medium is pumped onto a 5 ml Protein A column (Pharmacia) which had been equilibrated in 20 mM Na phosphate buffer, pH 6.8. After loading, the column is washed extensively with equilibration buffer before elution with 100 mM citric acid, pH 3.5. The eluted protein is immediately neutralized by collecting 1 ml fractions into tubes containing 275 μl of 1 M Tris buffer, pH 9. The highly purified protein is subsequently desalted into storage buffer as described above for the poly-His tagged proteins. The homogeneity is assessed by SDS polyacrylamide gels and by N-terminal amino acid sequencing by Edman degradation.

[0406] Many of the PRO polypeptides disclosed herein were successfully expressed as described above.

### Example 14

### Expression of PRO in Yeast

[0407] The following method describes recombinant expression of PRO in yeast.

[0408] First, yeast expression vectors are constructed for intracellular production or secretion of PRO from the ADH2/GAPDH promoter. DNA encoding PRO and the promoter is inserted into suitable restriction enzyme sites in the selected plasmid to direct intracellular expression of PRO. For secretion, DNA encoding PRO can be cloned into the selected plasmid, together with DNA encoding the ADH2/GAPDH promoter, a native PRO signal peptide or other mammalian signal peptide, or, for example, a yeast alpha-factor or invertase secretory signal/leader sequence, and linker sequences (if needed) for expression of PRO.

[0409] Yeast cells, such as yeast strain AB110, can then be transformed with the expression plasmids described above and cultured in selected fermentation media. The transformed yeast supernatants can be analyzed by precipitation with 10% trichloroacetic acid and separation by SDS-PAGE, followed by staining of the gels with Coomassie Blue stain.

[0410] Recombinant PRO can subsequently be isolated and purified by removing the yeast cells from the fermentation medium by centrifugation and then concentrating the medium using selected cartridge filters. The concentrate containing PRO may further be purified using selected column chromatography resins.

[0411] Many of the PRO polypeptides disclosed herein were successfully expressed as described above.

### Example 15

### Expression of PRO in Baculovirus-Infected Insect Cells

[0412] The following method describes recombinant expression of PRO in Baculovirus-infected insect cells.

[0413] The sequence coding for PRO is fused upstream of an epitope tag contained within a baculovirus expression vector. Such epitope tags include poly-his tags and immunoglobulin tags (like Fc regions of IgG). A variety of plasmids may be employed, including plasmids derived from commercially available plasmids such as pVL1393 (Novagen). Briefly, the sequence encoding PRO or the desired portion of the coding sequence of PRO such as the sequence encoding the extracellular domain of a transmembrane protein or the sequence encoding the mature protein if the protein is extracellular is amplified by PCR with primers complementary to the 5′ and 3′ regions. The 5′ primer may incorporate flanking (selected) restriction enzyme sites. The product is then digested with those selected restriction enzymes and subcloned into the expression vector.

[0414] Recombinant baculovirus is generated by co-transfecting the above plasmid and BaculoGold™ virus DNA (Pharmingen) into Spodoptera frugiperda (“Sf9”) cells (ATCC CRL 1711) using lipofectin (commercially available from GIBCO-BRL). After 4-5 days of incubation at 28° C., the released viruses are harvested and used for further amplifications. Viral infection and protein expression are performed as described by O'Reilley et al., Baculovirus expression vectors: A Laboratory Manual, Oxford: Oxford University Press (1994).

[0415] Expressed poly-his tagged PRO can then be purified, for example, by Ni²⁺-chelate affinity chromatography as follows. Extracts are prepared from recombinant virus-infected Sf9 cells as described by Rupert et al., Nature, 362:175-179 (1993). Briefly, Sf9 cells are washed, resuspended in sonication buffer (25 mL Hepes, pH 7.9; 12.5 mM MgCl₂; 0.1 mM EDTA; 10% glycerol; 0.1% NP-40; 0.4 M KCl), and sonicated twice for 20 seconds on ice. The sonicates are cleared by centrifugation, and the supernatant is diluted 50-fold in loading buffer (50 mM phosphate, 300 mM NaCl, 10% glycerol, pH 7.8) and filtered through a 0.45 μm filter. A Ni²⁺-NTA agarose column (commercially available from Qiagen) is prepared with a bed volume of 5 mL, washed with 25 mL of water and equilibrated with 25 mL of loading buffer. The filtered cell extract is loaded onto the column at 0.5 mL per minute. The column is washed to baseline A₂₈₀ with loading buffer, at which point fraction collection is started. Next, the column is washed with a secondary wash buffer (50 mM phosphate; 300 mM NaCl, 10% glycerol, pH 6.0), which elutes nonspecifically bound protein. After reaching A₂₈₀ baseline again, the column is developed with a 0 to 500 mM Imidazole gradient in the secondary wash buffer. One mL fractions are collected and analyzed by SDS-PAGE and silver staining or Western blot with Ni²⁺-NTA-conjugated to alkaline phosphatase (Qiagen). Fractions containing the eluted His₁₀-tagged PRO are pooled and dialyzed against loading buffer.

[0416] Alternatively, purification of the IgG tagged (or Fc tagged) PRO can be performed using known chromatography techniques, including for instance, Protein A or protein G column chromatography.

[0417] Many of the PRO polypeptides disclosed herein were successfully expressed as described above.

### Example 16

### Preparation of Antibodies that Bind PRO

[0418] This example illustrates preparation of monoclonal antibodies which can specifically bind PRO.

[0419] Techniques for producing the monoclonal antibodies are known in the art and are described, for instance, in Goding, supra. Immunogens that may be employed include purified PRO, fusion proteins containing PRO, and cells expressing recombinant PRO on the cell surface. Selection of the immunogen can be made by the skilled artisan without undue experimentation.

[0420] Mice, such as Balb/c, are immunized with the PRO immunogen emulsified in complete Freund's adjuvant and injected subcutaneously or intraperitoneally in an amount from 1-100 micrograms. Alternatively, the immunogen is emulsified in MPL-TDM adjuvant (Ribi Immunochemical Research, Hamilton, Mont.) and injected into the animal's hind foot pads. The immunized mice are then boosted 10 to 12 days later with additional immunogen emulsified in the selected adjuvant. Thereafter, for several weeks, the mice may also be boosted with additional immunization injections. Serum samples may be periodically obtained from the mice by retro-orbital bleeding for testing in ELISA assays to detect anti-PRO antibodies.

[0421] After a suitable antibody titer has been detected, the animals “positive” for antibodies can be injected with a final intravenous injection of PRO. Three to four days later, the mice are sacrificed and the spleen cells are harvested. The spleen cells are then fused (using 35% polyethylene glycol) to a selected murine myeloma cell line such as P3X63AgU.1, available from ATCC, No. CRL 1597. The fusions generate hybridoma cells which can then be plated in 96 well tissue culture plates containing HAT (hypoxanthine, aminopterin, and thymidine) medium to inhibit proliferation of non-fused cells, myeloma hybrids, and spleen cell hybrids.

[0422] The hybridoma cells will be screened in an ELISA for reactivity against PRO. Determination of “positive” hybridoma cells secreting the desired monoclonal antibodies against PRO is within the skill in the art.

[0423] The positive hybridoma cells can be injected intraperitoneally into syngeneic Balb/c mice to produce ascites containing the anti-PRO monoclonal antibodies. Alternatively, the hybridoma cells can be grown in tissue culture flasks or roller bottles. Purification of the monoclonal antibodies produced in the ascites can be accomplished using ammonium sulfate precipitation, followed by gel exclusion chromatography. Alternatively, affinity chromatography based upon binding of antibody to protein A or protein G can be employed.

### Example 17

### Purification of PRO Polypeptides Using Specific Antibodies

[0424] Native or recombinant PRO polypeptides may be purified by a variety of standard techniques in the art of protein purification. For example, pro-PRO polypeptide, mature PRO polypeptide, or pre-PRO polypeptide is purified by immunoaffinity chromatography using antibodies specific for the PRO polypeptide of interest. In general, an immunoaffinity column is constructed by covalently coupling the anti-PRO polypeptide antibody to an activated chromatographic resin.

[0425] Polyclonal immunoglobulins are prepared from immune sera either by precipitation with ammonium sulfate or by purification on immobilized Protein A (Pharmacia LKB Biotechnology, Piscataway, N.J.). Likewise, monoclonal antibodies are prepared from mouse ascites fluid by ammonium sulfate precipitation or chromatography on immobilized Protein A. Partially purified immunoglobulin is covalently attached to a chromatographic resin such as CnBr-activated SEPHAROSE™ (Pharmacia LKB Biotechnology). The antibody is coupled to the resin, the resin is blocked, and the derivative resin is washed according to the manufacturer's instructions.

[0426] Such an immunoaffinity column is utilized in the purification of PRO polypeptide by preparing a fraction from cells containing PRO polypeptide in a soluble form. This preparation is derived by solubilization of the whole cell or of a subcellular fraction obtained via differential centrifugation by the addition of detergent or by other methods well known in the art. Alternatively, soluble PRO polypeptide containing a signal sequence may be secreted in useful quantity into the medium in which the cells are grown.

[0427] A soluble PRO polypeptide-containing preparation is passed over the immunoaffinity column, and the column is washed under conditions that allow the preferential absorbance of PRO polypeptide (e.g., high ionic strength buffers in the presence of detergent). Then, the column is eluted under conditions that disrupt antibody/PRO polypeptide binding (e.g., a low pH buffer such as approximately pH 2-3, or a high concentration of a chaotrope such as urea or thiocyanate ion), and PRO polypeptide is collected.

### Example 18

### Drug Screening

[0428] This invention is particularly useful for screening compounds by using PRO polypeptides or binding fragment thereof in any of a variety of drug screening techniques. The PRO polypeptide or fragment employed in such a test may either be free in solution, affixed to a solid support, borne on a cell surface, or located intracellularly. One method of drug screening utilizes eukaryotic or prokaryotic host cells which are stably transformed with recombinant nucleic acids expressing the PRO polypeptide or fragment. Drugs are screened against such transformed cells in competitive binding assays. Such cells, either in viable or fixed form, can be used for standard binding assays. One may measure, for example, the formation of complexes between PRO polypeptide or a fragment and the agent being tested. Alternatively, one can examine the diminution in complex formation between the PRO polypeptide and its target cell or target receptors caused by the agent being tested.

[0429] Thus, the present invention provides methods of screening for drugs or any other agents which can affect a PRO polypeptide-associated disease or disorder. These methods comprise contacting such an agent with an PRO polypeptide or fragment thereof and assaying (I) for the presence of a complex between the agent and the PRO polypeptide or fragment, or (ii) for the presence of a complex between the PRO polypeptide or fragment and the cell, by methods well known in the art. In such competitive binding assays, the PRO polypeptide or fragment is typically labeled. After suitable incubation, free PRO polypeptide or fragment is separated from that present in bound form, and the amount of free or uncomplexed label is a measure of the ability of the particular agent to bind to PRO polypeptide or to interfere with the PRO polypeptide/cell complex.

[0430] Another technique for drug screening provides high throughput screening for compounds having suitable binding affinity to a polypeptide and is described in detail in WO 84/03564, published on Sep. 13, 1984. Briefly stated, large numbers of different small peptide test compounds are synthesized on a solid substrate, such as plastic pins or some other surface. As applied to a PRO polypeptide, the peptide test compounds are reacted with PRO polypeptide and washed. Bound PRO polypeptide is detected by methods well known in the art. Purified PRO polypeptide can also be coated directly onto plates for use in the aforementioned drug screening techniques. In addition, non-neutralizing antibodies can be used to capture the peptide and immobilize it on the solid support.

[0431] This invention also contemplates the use of competitive drug screening assays in which neutralizing antibodies capable of binding PRO polypeptide specifically compete with a test compound for binding to PRO polypeptide or fragments thereof. In this manner, the antibodies can be used to detect the presence of any peptide which shares one or more antigenic determinants with PRO polypeptide.

### Example 19

### Rational Drug Design

[0432] The goal of rational drug design is to produce structural analogs of biologically active polypeptide of interest (i.e., a PRO polypeptide) or of small molecules with which they interact, e.g., agonists, antagonists, or inhibitors. Any of these examples can be used to fashion drugs which are more active or stable forms of the PRO polypeptide or which enhance or interfere with the function of the PRO polypeptide in vivo (c.f., Hodgson, Bio/Technology, 9: 19-21 (1991)).

[0433] In one approach, the three-dimensional structure of the PRO polypeptide, or of a PRO polypeptide-inhibitor complex, is determined by x-ray crystallography, by computer modeling or, most typically, by a combination of the two approaches. Both the shape and charges of the PRO polypeptide must be ascertained to elucidate the structure and to determine active site(s) of the molecule. Less often, useful information regarding the structure of the PRO polypeptide may be gained by modeling based on the structure of homologous proteins. In both cases, relevant structural information is used to design analogous PRO polypeptide-like molecules or to identify efficient inhibitors. Useful examples of rational drug design may include molecules which have improved activity or stability as shown by Braxton and Wells, Biochemistry, 31:7796-7801 (1992) or which act as inhibitors, agonists, or antagonists of native peptides as shown by Athauda et al., J. Biochem., 113:742-746 (1993).

[0434] It is also possible to isolate a target-specific antibody, selected by functional assay, as described above, and then to solve its crystal structure. This approach, in principle, yields a pharmacore upon which subsequent drug design can be based. It is possible to bypass protein crystallography altogether by generating anti-idiotypic antibodies (anti-ids) to a functional, pharmacologically active antibody. As a mirror image of a mirror image, the binding site of the anti-ids would be expected to be an analog of the original receptor. The anti-id could then be used to identify and isolate peptides from banks of chemically or biologically produced peptides. The isolated peptides would then act as the pharmacore.

[0435] By virtue of the present invention, sufficient amounts of the PRO polypeptide may be made available to perform such analytical studies as X-ray crystallography. In addition, knowledge of the PRO polypeptide amino acid sequence provided herein will provide guidance to those employing computer modeling techniques in place of or in addition to x-ray crystallography.

[0436] The foregoing written specification is considered to be sufficient to enable one skilled in the art to practice the invention. The present invention is not to be limited in scope by the construct deposited, since the deposited embodiment is intended as a single illustration of certain aspects of the invention and any constructs that are functionally equivalent are within the scope of this invention. The deposit of material herein does not constitute an admission that the written description herein contained is inadequate to enable the practice of any aspect of the invention, including the best mode thereof, nor is it to be construed as limiting the scope of the claims to the specific illustrations that it represents. Indeed, various modifications of the invention in addition to those shown and described herein will become apparent to those skilled in the art from the foregoing description and fall within the scope of the appended claims.

The application's sequence listing, which the Patent Office published only in electronic form, follows.

SEQUENCE LISTING (1053 sequences)

SEQ ID NO: 1 - DNA, 4173 bp, Human
gcggccgcgggaagacccgagagtcattagaagcgcaagatggcgactgcggccgaaacctcggcttcagaacccgaggctgagtccaaggctgggcccaaggctgacggagaggaggatgaggttaaggcggctaggacaaggagaaaggtgttatcgcgggctgtggccgctgcgacatacaagaccatggggccagcgtgggatcagcaggaggaaggcgtgagcgagagcgatggggatgagtacgccatggcttcctccgcggagagctcccccggggagtacgagtgggaatatgacgaagaggaggagaaaaaccagctggagattgagagactggaggagcagttgtctatcaacgtctatgactacaactgccatgtggacttgatcagactgctcaggctggaaggggagcttaccaaggtgaggatggcccgccagaagatgagtgaaatctttcccttgactgaagagctctggctggagtggctgcatgacgagatcagcatggcccaggatggcctggacagagagcacgtgtatgacctctttgagaaagccgtgaaggattacatttgtcctaacatttggctagagtatggccagtactcagttggtgggattggtcagaaaggtggccttgagaaagttcgctccgtgtttgaaagggctctctcgtctgttggtttacatatgaccaaaggactcgccctctgggaggcttaccgagagtttgaaagtgcgattgtggaagctgctcggcttgagaaagtccacagtcttttccggcgacagttggcgatcccactctatgatatggaggccacatttgcagagtatgaagaatggtcagaagacccaataccagagtcagtaattcagaactataacaaagcactacagcagctggagaaatataaaccctatgaagaagcactgttgcaggcagaggcaccaaggctggcagaatatcaagcatatatcgattttgagatgaaaattggcgatcctgctcgcattcagttgatctttgagcgcgccctggtcgagaactgccttgtcccagacttatggatccgttacagtcagtacctagatcgacaactgaaagtaaaggatttggttttatctgtacataaccgcgctattagaaactgcccctggacagttgccttatggagtcggtacctcttggccatggagagacatggagttgatcatcaagtaatttctgtaaccttcgagaaagctttgaatgccggcttcatccaggccactgattatgtggagatttggcaggcataccttgattacctgaggagaagggttgatttcaaacaagactccagtaaagagctggaggagttgagggccgcctttactcgtgccttggagtatctgaagcaggaggtggaagagcgtttcaatgagagtggtgatccaagctgcgtgattatgcagaactgggctaggattgaggctcgactgtgcaataacatgcagaaagctcgggaactctgggatagcatcatgaccagaggaaatgccaagtacgccaacatgtggctagagtattacaacctggaaagagctcatggtgacacccagcactgccggaaggctctgcaccgggccgtccagtgcaccagtgactacccagagcacgtctgcgaagtgttactcaccatggagaggacagaaggttctttagaagattgggatatagctgttcagaaaactgaaacccgattagctcgtgtcaatgagcagagaatgaaggctgcagagaaggaagcagcccttgtgcagcaagaagaagaaaaggctgaacaacggaaaagagctcgggctgagaagaaagcgttaaaaaagaagaaaaagatcagaggcccagagaagcgcggagcagatgaggacgatgagaaagagtggggcgatgatgaagaagagcagccttccaaacgcagaagggtcgagaacagcatccctgcagctggagaaacacaaaatgtagaagtagcagcagggcccgctgggaaatgtgctgccgtagatgtggagcccccttcgaagcagaaggagaaggcagcctccctgaagagggacatgcccaaggtgctgcacgacagcagcaaggacagcatcaccgtctttgtcagcaacctgccctacagcatgcaggagccggacacgaagctcaggccactcttcgaggcctgtggggaggtggtccagatccgacccatcttcagcaaccgtggggatttccgaggttactgctacgtggagtttaaagaagagaaatcagcccttcaggcactggagatggaccggaaaagtgtagaagggaggccaatgtttgtttccccctgtgtggataagagcaaaaaccccgattttaaggtgttcaggtacagcacttccctagagaaacacaagctgttcatctcaggcctgcctttctcctgtactaaagaggaactagaagaaatctgtaaggctcatggcaccgtgaaggacctcaggctggtcaccaaccgggctggcaaaccaaagggcctggcctacgtggagtatgaaaatgaatcccaggcgtcgcaggctgtgatgaagatggacggcatgactatcaaagagaacatcatcaaagtggcaatcagcaaccctcctcagaggaaagttccagagaagccagagaccaggaaggcaccaggtggccccatgcttttgccgcagacatacggagcgagggggaagggaaggacgcagctgtctctactgcctcgtgccctgcagcgcccaagtgctgcagctcctcaggctgagaacggccctgccgcggctcctgcagttgccgccccagcagccaccgaggcacccaagatgtccaatgccgattttgccaagctgtttctgagaaagtgaacgggacgctgggagacaggaaatgccttacttcactctggcccggcggacctcccaccacccagcagtgcactggggatggacaggcctggtgtgctgcgtgctcgcaaccacagatggctcctcggctttagacagaaaggggaaggggttctaagtcaagagcctttcagtgctccctcatattgagggcagtggcagaaaagtgaccactctgcaggctgggcccaggatgtggtgtcctgagatagttttgtatcttaaagactgaggcacagaagcgaaacgagaacacactgtttttgagacacagttgtccaaatgtttctggccagctccggcccctttttgtatgacacttctcttccaccctgcacagcacatgtgcccgtcattcttttaattttaaaagatgaaatggcagatgctagtaattcacagaatggcctcttgtgggggtgggtctgagggaagtcagctataaaacatttgctggagttttgttcaatggggctgtgcatttttatattatgtgtttgtaaatgacatgtcagcccttgtttcatgtttcctaaaagcagaatatttgcaacatttgttttgtataggaattatttgtgccacctgctgtggactgttttctttgcctagtgactagtgacctgtgttgtctaaacatgagtttcagccctttggttttgtttaataccatgtcaaatgcaaacttcaattctccccatttagctttattaaactgacgttctcttcaaaacttcttgctgaatggtactcagatgtgcattcacatacagatgtgttttgaagtgggtgtaccttgctttacctaatagatgtgtaaatagaacttttgtaagtcaaatcccattgtcactttgatttaaattattccagctgtgatgtgtcttcattttatagcagtttgacactggagcttttgagcttttttacctcacatcttttatcaaataatatttactgctttgaaaacagcaacagcattggccagttcagtaggggaagcttgctttattaagacactctggagaaagacgtcagggaatccttgtatatgtcgtgggaatcaactcctcatttatctgttgcgtaagtttaagtttttgtgcatcagtcgggttttctatatttttttaacttaacattttttaatataaccgattaaaaagtagacagaacagtaaaataaactcctgtgtgcctacc

SEQ ID NO: 2 - DNA, 2033 bp, Human
cctccttccagtgcccggcgttcctcccttccccctcgccgccgaccgagttcttccttttcagaccgggtcgccttgctgtcgtcgcggtgattttcctgctactgctactgctgctgctgccaccgccactaccactgggctcatttgccccgaccccttcccgccgccccgcccccagccccacacaagatgtcagaggatttagcaaagcagctggcaagctacaaagctcagctccagcaagttgaagctgcattatctggaaatggagaaaatgaagatttgctaaaattgaagaaagatttacaagaagttatagaactaaccaaagaccttctgtcaactcaaccttctgagacgcttgcaagttcagacagttttgcttctactcaacctactcattcatggaaagtaggagacaagtgtatggcagtctggagtgaagatggacagtgttatgaagcggagattgaggagatagatgaagaaaatggcaccgctgcaatcacctttgctggttatggcaatgctgaagtgactccactgttgaacctcaagcctgtagaagaaggaaggaaggcaaaggaggacagtggcaacaaacccatgtcaaaaaaagaaatgattgcccagcagcgtgaatataaaaagaagaaagctttgaaaaaagctcagagaataaaagaacttgagcaggaaagagaggaccagaaagtgaaatggcaacaattcaacaacagagcctattctaaaaacaaaaaaggccaggtaaagaggagtatttttgcttcacctgagagtgtgactggtaaagttggagtaggaacctgtggaattgctgataaacctatgacacaatatcaagatacctctaaatacaatgtcaggcatttgatgcctcaataatcagaaaaactgttggatttcatctctgcagggctttacatttacctttttatccttatatttttctaaaggtaaattatttgttagatgagtaagcaagataccattgtcgtcattggttggcttcagtagaatgaaacgtgaagaaattgcatttgataactgctattcatttaacttttctcattatcagtaccacggttccctcaaagtttgttgaataaagcaacttttgtagatgctgtttcatacagcacttagatgaattattgatcttcctaatatcaggcgcctacttaacctatggtgtgtactttttgtaagttgtaacttgaaattttcagatgctttgaacttgacacatactctagcaattcattggaacaccaaggcaaaaacaccaacctgctaaaagagatcttttcatttttcttattttcagctttaaaacttagctgtcgttcagttaagcttaaagataggttaatttgtaaatggcaaagtttgttttgaggtttttcctcaataacttgtttcccaggcctattaggccatctctaaaattgatctagctgttttatttttatgtactcttagttttatgtaagaaaccttaggatgagctcccttttctaaggtgtttttgttttttgtatgtttgcttttttcctgttttttgttttttccatttacggcagtggtaccatgttttggatgtgtgatgtttatatgggagaacaaaaagctgatgtatagccctgtatacagtgtagatactatttttgtaaaaacacaaggctaaattaatgaacaagaatactgaatatttcatcattaaaaatttcttgtatttcttgtgcattaatctgacgataatttccctgtatattatgttcatttagctgtttgtaatttttgttaattagatcaggttgtctgcatttgttggtgtaagtgaacatcatcacagttatcctgagttgagtttaagccaaatacatgcatagaaaagggtcttcctattaatggaagaaggtaatttttaggatgtgtattatttcagttttgtatgtttaacttttattaaataaagtgtttttaaaatctccaaaaaaaaaaaaaaa

SEQ ID NO: 3 - protein, 238 aa, Human
MSEDLAKQLASYKAQLQQVEAALSGNGENEDLLKLKKDLQEVIELTKDLLSTQPSETLASSDSFASTQPTHSWKVGDKCMAVWSEDGQCYEAEIEEIDEENGTAAITFAGYGNAEVTPLLNLKPVEEGRKAKEDSGNKPMSKKEMIAQQREYKKKKALKKAQRIKELEQEREDQKVKWQQFNNRAYSKNKKGQVKRSIFASPESVTGKVGVGTCGIADKPMTQYQDTSKYNVRHLMPQ

SEQ ID NO: 4 - DNA, 2780 bp, Human
gtgggcggaccgcgcggctggaggtgtgaggatccgaacccaggggtggggggtggaggcggctcctgcgatcgaaggggacttgagactcaccggccgcacgccatgagggccctgtgggtgctgggcctctgctgcgtcctgctgaccttcgggtcggtcagagctgacgatgaagttgatgtggatggtacagtagaagaggatctgggtaaaagtagagaaggatcaaggacggatgatgaagtagtacagagagaggaagaagctattcagttggatggattaaatgcatcacaaataagagaacttagagagaagtcggaaaagtttgccttccaagccgaagttaacagaatgatgaaacttatcatcaattcattgtataaaaataaagagattttcctgagagaactgatttcaaatgcttctgatgctttagataagataaggctaatatcactgactgatgaaaatgctctttctggaaatgaggaactaacagtcaaaattaagtgtgataaggagaagaacctgctgcatgtcacagacaccggtgtaggaatgaccagagaagagttggttaaaaaccttggtaccatagccaaatctgggacaagcgagtttttaaacaaaatgactgaagcacaggaagatggccagtcaacttctgaattgattggccagtttggtgtcggtttctattccgccttccttgtagcagataaggttattgtcacttcaaaacacaacaacgatacccagcacatctgggagtctgactccaatgaattttctgtaattgctgacccaagaggaaacactctaggacggggaacgacaattacccttgtcttaaaagaagaagcatctgattaccttgaattggatacaattaaaaatctcgtcaaaaaatattcacagttcataaactttcctatttatgtatggagcagcaagactgaaactgttgaggagcccatggaggaagaagaagcagccaaagaagagaaagaagaatctgatgatgaagctgcagtagaggaagaagaagaagaaaagaaaccaaagactaaaaaagttgaaaaaactgtctgggactgggaacttatgaatgatatcaaaccaatatggcagagaccatcaaaagaagtagaagaagatgaatacaaagctttctacaaatcattttcaaaggaaagtgatgaccccatggcttatattcactttactgctgaaggggaagttaccttcaaatcaattttatttgtacccacatctgctccacgtggtctgtttgacgaatatggatctaaaaagagcgattacattaagctctatgtgcgccgtgtattcatcacagacgacttccatgatatgatgcctaaatacctcaattttgtcaagggtgtggtggactcagatgatctccccttgaatgtttcccgcgagactcttcagcaacataaactgcttaaggtgattaggaagaagcttgttcgtaaaacgctggacatgatcaagaagattgctgatgataaatacaatgatactttttggaaagaatttggtaccaacatcaagcttggtgtgattgaagaccactcgaatcgaacacgtcttgctaaacttcttaggttccagtcttctcatcatccaactgacattactagcctagaccagtatgtggaaagaatgaaggaaaaacaagacaaaatctacttcatggctgggtccagcagaaaagaggctgaatcttctccatttgttgagcgacttctgaaaaagggctatgaagttatttacctcacagaacctgtggatgaatactgtattcaggcccttcccgaatttgatgggaagaggttccagaatgttgccaaggaaggagtgaagttcgatgaaagtgagaaaactaaggagagtcgtgaagcagttgagaaagaatttgagcctctgctgaattggatgaaagataaagcccttaaggacaagattgaaaaggctgtggtgtctcagcgcctgacagaatctccgtgtgctttggtggccagccagtacggatggtctggcaacatggagagaatcatgaaagcacaagcgtaccaaacgggcaaggacatctctacaaattactatgcgagtcagaagaaaacatttgaaattaatcccagacacccgctgatcagagacatgcttcgacgaattaaggaagatgaagatgataaaacagttttggatcttgctgtggttttgtttgaaacagcaacgcttcggtcagggtatcttttaccagacactaaagcatatggagatagaatagaaagaatgcttcgcctcagtttgaacattgaccctgatgcaaaggtggaagaagagcccgaagaagaacctgaagagacagcagaagacacaacagaagacacagagcaagacgaagatgaagaaatggatgtgggaacagatgaagaagaagaaacagcaaaggaatctacagctgaaaaagatgaattgtaaattatactctcaccatttggatcctgtgtggagagggaatgtgaaatttacatcatttctttttgggagagacttgttttggatgccccctaatccccttctcccctgcactgtaaaatgtgggattatgggtcacaggaaaaagtgggttttttagttgaattttttttaacattcctcatgaatgtaaatttgtactatttaactgactattcttgatgtaaaatcttgtcatgtgtataaaaataaaaaagatcccaaat

SEQ ID NO: 5 - protein, 803 aa, Human
MRALWVLGLCCVLLTFGSVRADDEVDVDGTVEEDLGKSREGSRTDDEVVQREEEAIQLDGLNASQIRELREKSEKFAFQAEVNRMMKLIINSLYKNKEIFLRELISNASDALDKIRLISLTDENALSGNEELTVKIKCDKEKNLLHVTDTGVGMTREELVKNLGTIAKSGTSEFLNKMTEAQEDGQSTSELIGQFGVGFYSAFLVADKVIVTSKHNNDTQHIWESDSNEFSVIADPRGNTLGRGTTITLVLKEEASDYLELDTIKNLVKKYSQFINFPIYVWSSKTETVEEPMEEEEAAKEEKEESDDEAAVEEEEEEKKPKTKKVEKTVWDWELMNDIKPIWQRPSKEVEEDEYKAFYKSFSKESDDPMAYIHFTAEGEVTFKSILFVPTSAPRGLFDEYGSKKSDYIKLYVRRVFITDDFHDMMPKYLNFVKGVVDSDDLPLNVSRETLQQHKLLKVIRKKLVRKTLDMIKKIADDKYNDTFWKEFGTNIKLGVIEDHSNRTRLAKLLRFQSSHHPTDITSLDQYVERMKEKQDKIYFMAGSSRKEAESSPFVERLLKKGYEVIYLTEPVDEYCIQALPEFDGKRFQNVAKEGVKFDESEKTKESREAVEKEFEPLLNWMKDKALKDKIEKAVVSQRLTESPCALVASQYGWSGNMERIMKAQAYQTGKDISTNYYASQKKTFEINPRHPLIRDMLRRIKEDEDDKTVLDLAVVLFETATLRSGYLLPDTKAYGDRIERMLRLSLNIDPDAKVEEEPEEEPEETAEDTTEDTEQDEDEEMDVGTDEEEETAKESTAEKDEL

SEQ ID NO: 6 - DNA, 6367 bp, Human
cccgtggctgagaagaaggaggcctgagagcgacatgtccccggcggctcaggcggagcggcccgtggcgctgtttttctgagtccggggtggcctggcagccggccgaggacgagggtcggcgggggctgcccccgtggtggtggccgccatgctgggagcctgggcggttgagggaaccgctgtggcgctcctgcgactgctgctgctgctgctgccgccggcgatccggggacccgggctcggcgtggccggcgtggccggcgcggcgggggccgggctgcccgagagcgtcatttgggcggtcaacgcgggtggagaggcgcatgtggacgtgcacgggatccacttccgcaaggaccctttggaaggccgggtgggccgagcctcagactatggcatgaaactgccaatcctgcgttccaaccctgaggaccagatcctgtatcaaactgagcggtacaatgaggagacctttggctacgaagtgcccatcaaagaggagggggactacgtgctggtcttgaaatttgcagaggtctactttgcacagtcccagcaaaaggtatttgatgtacgattgaatggccacgtcgtggtgaaggacttggatatctttgatcgtgttgggcatagcacagctcacgatgaaattatacctatgagcatcagaaaggggaagctgagtgtccagggggaggtgtccaccttcacagggaaactctacattgagtttgtcaaggggtactatgacaatcccaaggtctgtgcactctacatcatggctgggacagtggatgatgtaccaaagcttcagcctcatccgggattggagaagaaagaagaggaagaagaagaagaagaatatgatgaagggtctaatctcaaaaaacagaccaataagaaccgggtgcagtcaggcccccgcacacccaacccctatgcctcggacaacagcagcctcatgtttcccatcctggtggccttcggagtcttcattccaaccctcttctgcctctgccggttgtgagaacaaatgactatcctgaacagggtggaggggtgtgggaaagaaaccagccatattggttttggtttctgtatttttcacaatgattaatgaacaaaaacaaagagaaaaaaacacacatcaattaaaggagacaaaaagaggcagagcgagtagagagcagccctcattcaccacctggtcccagacgtgcttcagtcctcgtcctctctttgtggctggctcccagccttctctttcctcttgaggatacttagggtaaactggatccttcctgctcaaggatcctcatttgtatacctagtggaaaggactctgaactcagaggagtcactgttcctttttttaggttagaaattaacagcagggaaatgccatcttattacctgagacgaccagcactgggagttaggtacggtctgaagttatgtctagataagacttcagacgtcctgggattgaaagaatgtgtgtgaaggggtagaatttgtgcggtaaagacttaaaaaaaaaagtagggagattaaaaaaaaagaaagaaaatgcttccttatctggaagcctttctggattaatccagtgatggtcccacctttagtgtttgagctttgtcattgcttgtctccctggcatgtgccagttatagactgtccagcatccaagacgtttcggttatgtcgggtcctcagatcgcctctgacttgttaccacaacaaatcattttgatttcagtgcctgttggggacttgatttcttctcagttttgtttgtttgtttgtttccttaatctggctcatttgaaatttcttctccctctcaaccatcccactaagttatagccaagaagggaaggagacacggggatttggggttctctgcttgaatgtcttctcctttaccacctcaccttgttggtacctccctccctggatctctgagccagcagccaggaggacctgacccagcagttctttactggcccctttgtagggccttgctgccagggggcagggatgctttccagcctgcagcaacagaacacttgaccttaaaagtctcttctggtctttggattagaaaaggcttatgttagcatagcttaagagcaacctcagagacttgagccctactaagtgactgaccactgtttagagtgtctggtatctgatgttcatttattcccatgttcttgtgtgtcacagttcagccagttttggtttatgcctagagctacttcaaggaactagactaattagctatataggcccagcgatgcttcttattgatcttaatagtatgcccctccttcccctgtcctttcatttctctatccaagtagcagtcaggttcttggtgtgatgggactgaaagaattccagtcagccagagccttggcagctctgaagctaaccttagcatctaagtgtcgatcttgaattccctgaaaaaatttctataggaaatgaagcttccctggtcccctcctttctggccattgtcatccatttcccagttagggcaacaatgaaggaggacccagccaagctagaaggaattttgtggatgggagacagcaggattagcttcagcttgggctggagcagtcaatataggatctcaggccaggcccgcttttctagaatgtgtttaattttgagtttgctttattagatatgttttttaagagctctgtatatttgaactgctccttatgtgacaaaataggtagctcttgggctcatgtcctgggttttggctctttaatgattactccaggccagcatttagtcgtttgagaattgtagcctgttgttttcgctgtgacttgggtctcagtgctagggtattgagtcaggcagctggagggttgtggcccgaggctgcagtcagaggtatacttcccatagtgcttcacacagctcccctgcttctaaaggataaggtactgtagccttggtcctggggaccacctgcctggggcagtggacatcctaactaaacaggcttctggcagtagctttggttcctatcccatcgaaattccccaaagccctgggccactgccattgggttagtcaagatgaaggaggaggactggctgcctccattttgccttgtttgttagtttgcctgggtctgtctgaggaaggagggggtcccgccttccacctcaacacatcccttcagtgactcagagtctcagaaggaaaccctgactcctggggccatttcctaatggtactgtaagccaagcagctttgcttctgcctctgtttccaagcccacccttttcccctgagctcagggttagggatgggcgctttcctctctggttgtgaacgaaaggaaggaacatctttctatggctaacaaaaactaaaggggaagtgaggaaacaggaagaagtatggtgggggctggggtagactcccctggagccaagcctatccagctaacaagagctccctggggctggtcacagctggctcatgatgctgaacttgaaagtttttttgtttttgtttttgttttgtggctcctccaagatataggtacatgaagtttaggttaaaggggtgggattctttatttttatttttgtattgtatgtgtcaagaattactctgttgttcaccttttgctttttgcactgtttgttctcttatctgtattttgagcttagtgctaggactgagaggctgcaccatagggaatgtatgggagatggtgaggggtgccagtgaggggtgcgtggaggagaggcctgggctcctctactggatctacactctgtcccaggtttttagatcccactgagcccagctgactgaaaacaaggacagtcagggtgaaacttcttttgccagaagtgtggcctgagttgaatttctgggaggatgacgcagatgtctgctgcagagctgggctgagagttctgcagtctagctctgacttaggtcaggggcctgttggtctctcattggacgtttttgggtctcactcatgcttactgaaacattgtgccaagaaactctgtgggatttgtgtcccttaaaccagactcacttttctgaaaaatctccattgttgaggagaggctgctcaatcgacaccccgagttctcatgactgggaagatagttttcttcaggtgtcaatggcgttagactcccaggaagactagccctgcccacagggccacctgttggtttgagagcgtgttcgtgttctcttgccctccctgcctaagagctactgggatcacgttagcgggcatttaggctttgatgagagggcacagtttgagttaggtttacctccccctttctgtgcctgggaactgtttggtccagctttagaactgtggttttgacttccttatctcttgggagaagcttctgttttaaggaatttctcttccttcttctcctgcctctagcctctcctggaaaggcctggatatggtttctaaaatctcagctgagaacttcagaaaacagcagcagtattttccttttcctagtgctaaaatccctttccctagaaattggctcaccttgggaaacccagggaaagaatcagcaggttctctgccctccctaggggttggggaaggacccaccccggtcagcacagtgccttttcctctcctgctctgagccagggtggggcattccctctagattcaggtttgggcaggggtcctatagtccctgccatggggctgcttccctgtcccttccctcccctttgctggcctactctggcataattcaagtgtcttcttgccttggggatccttagtggcatcaaatggcaacatggaatattgtcctccatgcccctccagaaggacctaggagagtaggtgagctttccaaagtgagagacgaatctttctttctttttttttttaaagggcaggatgggtatgctttgggctttctccttctgtggccccggaggaaggagagactgaggcaaggcaaagtgatagtacactgaagcagaaccggaaacacccaggaactgttcagaaatctcagaagaaatctgcttctcttcgatggaaagatataattaacgatcaaagagctctaagaaaattgcaaagaagccttaatgttcaagctttagaaagatcagagcaatttttctctttcagtccaaactaagactctctgtatttaaatctctctggggcaagagggctagatttcctcattttgttatgagactagattggtaccagtagatcagctgcctagcgagggcaggtttcttctttgcatctgtgtggcttgcttccagtctggcctgtcctttccagctgccttttgtctagcctgctatggggggccagattatcttgataagagcaggtgatttggggactagctgggttggcaggaaaagagcaggatggatctcttgggacaggttcccccaggagtataaacacaaggagccaggattgtgctggcagccaaggaaacagtagtgcctgtttgagttggcagagagggccttggcacctcttgcatccaggcagtcttgtgagatgggggcacatagcactggggaaagcagaactccattctcacctctattttgagcttcagtgctttatttcagtatgaggaaaaacaacaacaaactgaagtgcgctttccgtcctttcaaaggacaactgtcgggaagggagagccgagttgcgaggtaggaggggagcactggcagggagagacattcttgactcctctcttccctggtgtgttgtgatccagggaatgaaaagaaatttgaccctggattggttctctccttggacttaaggaatcttaccttttccttccacaaagttctcccaggcaaggaccagctgcccattctgagcccagggcagcctcttcaaccattattggtctaacctggcttgtcaggaaaccaagcccacccttccacattgggcctggctgctctattctgtaccaagtactggagaaaaagcatcaagttcttagcccttgtagcttctaccctagtttcccatcctctctctgtggaggccaaaccaactctttgccagcagccacaacatgcattgacagcggcacagtgagatataactgatgggctttgaacctggttggccggggaagctgtaggggtggatagagctggctttccttctgggctgtctccatctgaccctaccccttccatgtcccaccccactcccaccaaaaagtacaaaatcaggatgtttttcactgtccattgctttgtgttttaataaacaatttgcagtgacactctgaaaaaaaaaaaaaaaaaa

SEQ ID NO: 7 - DNA, 3209 bp, Human
cacggttggacgagatctaaacagctttacttagaacgagttttgaagggtgatgtggaaaactttctaaatttaagatccgcattgaagacccaccccgcagaaagcacatggtattcctgggtggtgcagtttctagcggatatcatgaaagacaaagacaactatttggatgacccgacaagagtaccaagaacaagggtgtccgtcgtgctagagaaacttggtagtgactgttcagataaaactccaaagcttgttcccatcatacccgtaatgctttctcttttcctttatttcagcctcacttgatcaatgttgaaggagttggtgttgctgaattgctttttaacacaattcaggcagctgacattgataccagatctgaattctacaaacacattgtgctttctggagggtctactatgtatcctggcctgccatcacggttggaacgagaacttaaacagctttacttagaacgagttttgaagggtgatgtggaaaaactttctaaatttaagatccgcattgaagacccaccccgcagaaagcacatggtattcctgggtggtgcagttctagcggatatcatgaaagacaaagacaacttttggatgacccgacaagagtaccaagaaaagggtgtccgtgtgctagagaaacttggtgtgactgttcgataaactccaaagcttgttcccatcatacccgtaatgctttcttttttcctttattgccaatctttgaactcattcaactccaggacatggaagaggcctctctctgccctttgactggaaaggtcaagttttattctggtgtcttggggaagctttgttaaatttttgttaatgtgggtaaatctgagtttaattcaactgcttccctacatagactagagggctaaggattctgtctgctgctttgtttcttctaagtaggcatttagatcattcctgtaggcttcctattttcactttactgctctaatgctgctagtcgtagtctttagcacactaggtggtatgcctttattagcataaaacaaaaaaaactttaacaggagcttttacatattactgggatggggggtggttcgggatgggtgggcagctgctgaaccctttagggcatttcctctgtaatgtggcgctttcaactgtactgctgcagctttaagtaccttaaagcttctcctgtgaacttcttagggaaatgttaggttcagaactaaagtgttttgggtgggttttgttgcgggggggagggtaacaatgggtggtcttctgatttttatttttgaggttttgtcaactggagtacgtagaggaactttatttacagtactttgatttggcaggttttcttctacttgtgctctgcctggagctgtttccatatgatataaaaagcaagtgtagtattccattactatgtggcttagggatttatttgttttttaaaatcaaccatgttagctgggattagactccctacagtccttcaatggaaaagtaacatttaaaaatcctttgggtaattcgaattacagatttaaaagagcttaagatctggtgttttgttaatgcttctgtttattccagaagcattaaggtaacccattgccaagtatcattcttgcaaattattcttttatataactgaccagtgcttaataaaacaagcaggtacttacaaataattactggcagtaggttataattggtggtttaaaaataacattggaatacaggacttgttgccaattgggtaattttcattagttgttttgtttgttttgatttgaaacctggaaatacagtaaaatttgactgtttaaaatgttggccaaaaaaatcaagatttaatttttttatttgtactgaaaaactaatcataactgttaattctcagccatctttgaagcttgaaagaagagtctttggtattttgtaaacgttagcagactttcctgccagtgtcagaaaatcctatttatgaatcctgtcggtattccttggtatctgaaaaaaataccaaatagtaccatacatgagttatttctaagtttgaaaaataaaaagaaattgcatcacactaattacaaaatacaagttctggaaaaaatatttttcttcattttaaaacttttttttaactaataatggctttgaaagaagaggcttaatttgggggtggtaactaaaatcaaaagaaatgattgacttgagggtctctgtttggtaagaatacatcattagcttaaataagcagcagaaggttagttttaattatgtagcttctgttaatattaagtgttttttgtctgttttacctcaatttgaacagataagtttgcctgcatgctggacatgcctcagaaccatgaatagcccgtactagatcttgggaacatggatcttagagtcactttggaataagttcttacataaatacccccagccttttgagaacggggcttgttaaaggacgcgtatgtagggcccgtacctactggcagttgggttcagggaaatgggattgacttggccttcaggctcctttggtcataattttaaaatatgggagtagaaaacaacaaagaatggaatggactcttaaaacaatgaaagagcatttatcgtttgtcccttgaatgtagaatttgtttttgatttcataattctgctggtaaatgtgacagttaaaatggtgcattatgtatatatattataatttagaaataccattttataattttactattccagggtgacataatgcatttaaatttgggatttgggtggagtattatgtttaactggagttgtcaagtatgagtccctcaggaaaaaaaaaaaattctgttttaaaaagcaatctgattcttagctcttgaaactattgctacttaaatttccaataattaaaaatttaaaatttttaaattagaattgccaatacttctacatttgagaagggtttttttagaaatacatttagtaaagtccccaagacattagtcttacatttaaacttttttctttaaaacatggttttggtggttaacttttacacagttctgagtactgttaatatctggaaagtatcttgagatatcagtggaaagctaaacagtctaaattaacatgaagtacttcattttgattgagaaaataaaatcagattttttcaaagtcaaaaaa

SEQ ID NO: 8 - DNA, 3285 bp, Human
ctagaattcagcggccgctgaattctagacccggatgaagagtaacgccattaccgcccgagccgccgagagccttagccgacggaaactggacactggaccggcagcgccatgagactcctcccccgcttgctgctgcttctcttactcgtgttccctgccactgtcttgttccgaggcggccccagaggctcgttagcagtggcacaagatcttacagaggatgaagaaacagtagaagattccataattgaggatgaagatgatgaagccgaggtagaagaagatgaacccacagatttggtagaagataaagaggaagaagatgtgtctggtgaacctgaagcttcaccgagtgcagatacaactatactgtttgtaaaaggagaagattttccagcaaataacattgtgaagttcctggtaggctttaccaacaagggtacagaagattttattgttgaatccttagatgcctcattccgttatcctcaggaccaccagttttatatccagaatttcacagctcttcctctgaacactgtagtgccaccccagagacaggcaacttttgagtactctttcattcctgcagagcccatgggcggacgaccatttggtttggtcatcaatctgaactacaaagatttgaacggcaatgtattccaagatgcagtcttcaatcaaacagttacagttattgaaagagaggatgggttagatggagaaacaatctttatgtatatgttccttgctggtcttgggcttctggttattgttggccttcatcaactcctagaatctagaaagcgtaagagacccatacagaaagtagaaatgggtacatcaagtcagaatgatgttgacatgagttggattcctcaggaaacattgaatcaaatcaataaagcttcaccaagaaggttgcccaggaaacgggcacagaagagatcagtgggatctgatgagtaaatgttcctttgtgcaacaattcggtctttacttaacctgccctaatatttttcggcctgatgggaattagtgcagagaagccagtcaccatagaaggcaactcctacttgtgtgtggactgagcaatcagagtctgtggcgataatattgctgaaaatgcactgcattcatttttctaaagtaacaaatttggtttttttttaaaccattaaaatctatgtgtgtgcgtgtgtatgtatgtgagcagttggtcttaccagaatcattgttgaactacctgaaacaagtctttagaatactaaatataatgctgttgtctcttcctttttgacattttctgattttttcccccaaaactcagttaatatttacccactatgattattgatgtcctgccttgaacagttttaaagaaaacaatttttggaatagctcaaatttcaattgatggcacaaatcagcattttgttgttgttactgtattacaattagtattctaaaggcagaagcagaagtagctgctttttagcaatagaattgtttcagtattttgctgctgtttaatgcgcatcttcagaaaacttcccagtggcttcaaggaatttggggatctctctggcaacaaattgtgaaacatgaaatttctgctgactttaatatatgaaacctaatcctacccccttttttaacaaaaagaaactagtacatttgtgaaaattgtgttgtgttgtccattgttgctctagttctgacccagaggtagctctggagtgattttagacctactcactcagttgtgtgtaggtttttttgttttgttttgagagagaatttttctctccttaatagaagcatcctttttaaagagaagttgccttggtccacacactaagcagaaaaccaagttatcaggacagagatatttcccagttactcctaatcaatgaagaaagtgagttggatatttttaaagcagttaactaattttttcttacctaatcttttgggagttttgcttgttgatataacctttttagttaacctgaaagattccaaaaattgttcttaagtgcttgagactggaaccaaaattaaattgtacttcataaaatcctcttatagagttactcttgccctagattgtaaattaagtttggcattattgtcagactggatggagggtgaagtaaaatagtatgaacaattaagaggctctccccctcttgtctttaagccatattctcctacatgtattttataagaaaatgttaagtcaaattttagtggctctttaattcctgacctcttcattctccttttcagtataacctcccctatgctcatgcccacacagacaaaaaaacaaaacgaaatacacacagaaaaaagtctttccaaactgtttaagtatttaaacatctgagccaaagcagatagaagttattgtataattgttaatcactttgcaaataggggctatcaaattacctatattggcattgctggattataaactctatatctgtaatataaagtgtttgagtttttaattgggctgttatgatcagtaattgattttgagaaagctctatgagctctaagtaactgcatggttttttgtttaatgtaatataggagacccttcacattcccaaggaatatattccaaaacatttttgtgaatatctaagtttgtgaaactactagggcatgatacagtaaggtgtaattacagaatttacgaaatgtaaatggcctctacagagttttatggaatacctggtactaacgtaggcagctgcaaaaccacactgagttacagctgtcagccctcctcattcctaaataacttgccttacatatcagccctcccacttctgaagttcaaattagtgcctcggaaatgtagaatttattatttgtcattttttttttttagcatagattgagaacagttgaactcttaaatcctcagatgccaggggtctgctctagcatcagtaagtatttagcagaaactaactccgtaatgaatggaattcaattccacacatggtttgttcaagcacacttaataagtagcctattttttaaatgtctttttaaaatgtaaatatttggatgaagtttttctttgttttgatatattcatttgctacaccaactatgttttcagaattcatcttttgaacaacttggtttcagaatatgtaaaatgactttaaggatcttgtgtatcaaacctatccccggatgtgtgagaataatgtgttcataaagcatggatctcgtaaaaaaaaaaaaaaaaaaaaa

SEQ ID NO: 9 - protein, 286 aa, Human
MRLLPRLLLLLLLVFPATVLFRGGPRGSLAVAQDLTEDEETVEDSIIEDEDDEAEVEEDEPTDLVEDKEEEDVSGEPEASPSADTTILFVKGEDFPANNIVKFLVGFTNKGTEDFIVESLDASFRYPQDHQFYIQNFTALPLNTVVPPQRQATFEYSFIPAEPMGGRPFGLVINLNYKDLNGNVFQDAVFNQTVTVIEREDGLDGETIFMYMFLAGLGLLVIVGLHQLLESRKRKRPIQKVEMGTSSQNDVDMSWIPQETLNQINKASPRRLPRKRAQKRSVGSDE

SEQ ID NO: 10 - DNA, 2454 bp, Human
ttccggttcccagagtggggcacagcgaggcgctagggggaacgctggcctctgaaactagctctgggaccggggtctgcggccggcccctagctggccccgtctcccatccccagaagggtattcactggggattctgagctttggctactccagtttcccacgacacgatgttccctttctacagctgctggaggactggactgctactactactcctggctgtggcagtgagagaatcctggcagacagaagaaaaaacttgcgacttggtaggagaaaagggtaaagagtcagagaaagagttggctctagtgaagaggctgaaaccactgtttaataaaagctttgagagcactgtgggccagggttcagacacatacatctacatcttcagggtgtgccgggaagctggcaaccacacttctggggcaggcctggtgcaaatcaacaaaagtaatgggaaggagacagtggtagggagactcaacgagactcacatcttcaacggaagtaattggatcatgctgatctataaagggggtgatgaatatgacaaccactgtggcaaggagcagcgtcgtgcagtggtgatgatctcctgcaatcgacacaccctagcggacaattttaaccctgtgtctgaggagcgtggcaaagtccaagattgtttctacctctttgagatggatagcagcctggcctgttcaccagagatctcccacctcagtgtgggttccatcttacttgtcacgtttgcatcactggttgctgtttatgttgttggggggttcctataccagcgactggtagtgggagccaaaggaatggagcagtttccccacttagccttctggcaggatcttggcaacctggtagcagatggctgtgactttgtctgccgttctaaacctcgaaatgtgcctgcagcatatcgtggtgtgggggatgaccagctgggggaggagtcagaagaaagggatgaccatttattaccaatgtagattgcactttatatgtccagcctcttcctcagtcccccaaaccaaagctacacagccagatttctcaagcagtctcaactccagtccctcatctcacccttactattgctcttgctttccagtttgcttttgatttgcatcttctcactagtaaaactgccttccctttgttccttattttctgttttttctctagagaggtacagttgtaagtcagagttaatataatagggcctgtgaaaacagaggcttttgcattgtctcttgacatcagaagttacaataggcatatgggcaaaatggtgtagcaggctcactggccgtttgttttttaaacacattttcacaagtttttgagacactggatttctttaattaaaaaaaaaatgccaagaaacattatttatacagggttgattgctttcatgttgttattctgtaccctatagtagcctccatgagaatctggtatttcttgctgcttggaactactttgcagtgattacttggttgcagtccaagtactctcgtttagtctgagcctggagatgttctagacttgcttctcccacctctgagattaggacaggaaaaatgtgaaatttcccaattacaggattatacggtaccatcacatcatttgtggaaattggggtgactgtatagctgggattgggctaaggactgtggtcttatctgtccacatacagccaaaatgcctatccagaaatccagttcgttggaaaggaaaattggtactcctgtgccacaggggttccagaaaagggaagtcactttaccttgcggtggtgggatcctgatgtctttcatccatttgtagtaaaagctggtaaagcttttcttactcctggttccctaccagtatttctaaacatgtcgcactttctccacaggcatgtggttttgacctttttttcaatcttctagaaagggaacggaagcagaagtgggacatcgagggctctgctgtcctctgcgctgggtgtggaatgctgctgcacctgtcccttctgctggctcagggaagtgtcttcttgcccacatttctgtggggaaaggtttttaatcctctgatgcttccatcttcctgtttaggccatgtgcccagaaacctggactgatctttctttaatagtgaacccctgggccactgaagagtaacatggctccactggacacaaaagagggatggaatcaacaggcagggggccttttataagccttaggaaaagaaaatgaaactatttcatctttggacttttcaatactattggagtgatttttttctttctaaacagggaaaataatgttacaaaagcatcttttttgttatttgtttgcatccctcccccacaccctggtgttttaaaatgaagaaaaaaaaccatcaccttttgtacaaaaactcttaatgattaaaaaacaaaca

SEQ ID NO: 11 - protein, 277 aa, Human
MFPFYSCWRTGLLLLLLAVAVRESWQTEEKTCDLVGEKGKESEKELALVKRLKPLFNKSFESTVGQGSDTYIYIFRVCREAGNHTSGAGLVQINKSNGKETVVGRLNETHIFNGSNWIMLIYKGGDEYDNHCGKEQRRAVVMISCNRHTLADNFNPVSEERGKVQDCFYLFEMDSSLACSPEISHLSVGSILLVTFASLVAVYVVGGFLYQRLVVGAKGMEQFPHLAFWQDLGNLVADGCDFVCRSKPRNVPAAYRGVGDDQLGEESEERDDHLLPM

SEQ ID NO: 12 - DNA, 2555 bp, Human
ggcgccgcatgtgtctccgcggcggctgcagccctcgagcgcccgccgccgcgccccaaccccggccgccgcccgccctcccgccccggcctcgcgcccccgtcccggcctcgcgccccggccgccctttgttgacgccggccaggccgtgcggtcggatgcgccgcggcagccccgggccccggctcggaggctcccggggcgagaggaggcggcccgccggccgggaccccgcgcgagtcggccccggccaggggctgcgtaggcccgcccggccaggcccagccgcctggacagagacagggcagggcattgttcatgcactgaccgacctcagcatccccggcatgacctcagggaacggaaactctgcctccagcatcgccggcactgccccccagaatggtgagaataaaccaccacaggccattgtgaaaccccaaatcctgacgcatgttatcgaagggtttgtgatccaggagggggcggacgtttcccggtgggacgctcgtctgctggtggggaatctcaagaagaagtatgcacaggggttcctgcctgagaaacttccacagcaggatcacaccaccaccactgactcggagatggaggagccctatctgcaagaatccaaagaggagggtgctcccctcaaactcaagtgtgagctctgtggccgggtggactttgcctataagttcaagcgttccaagcgcttctgttccatggcttgtgcaaagaggtacaacgtgggatgcaccaaacgggtgggacttttccactcagaccggagcaagctgcagaaggcaggagctgcgacccacaaccgccgtcggccagcaaagccagtctgccaccacttaccaaggataccaagaagcagccaacaggcactgtgcccctttcggttactgctgctttgcgtaacacacagccaggaagactccagccgttgctcagataactcaagctatgaggaacccttgtcacccatctcagccagctcatctacttccgccggcgacaaggccagcgggacctggagctccccgacatgcatatgcgggacctggtgggcatgggacaccacttcctgccaagtgagccaccaagtgaatgtagaagacgtctacgaattcatccgctctctgccaggctgccaggagatagcagaggaattccgtgcccaggaaatcgacgggcaagccctgctgctgctcaaggaggaccacctgatgagcgttatgaacatcaagctggggcccgccctgaagatctacgcccgcatcagcatgctcaaggactcctagggctggtggcaccaggattctggcccagggcgcctcctcccgactgagcagagccagacagacattcctgaggggcccagaaatggcggcgttggagggcaggggctctccctaggggcatagctggtgaggaggtctgggcacctcctccatggctctcaggggcctttcatttctgtgggaggggcagagaggtaggtggcacagaagatggggctttatgcttgtaaatattgatagcactggcttcctccaaagtcccaatactctagccccgctctcttcccctctttctgtcccccattttccagggggtatatggtcagggctccccaacctgagttggttacttcaagggcagccagcaggcctggatggaggcctagaaagcccttgccttccttcctcccacttctttctccaggcctggttaactcttccgttgtcagcttctcccccttcagcctgtttctgcagcagccagggttctcccccctacaccctctgcaggtggagagagagaagctgggcccagccgcggtgcctgctggccaagacgccttaacgctgtgtgtatgactgtgtgactgtgtgggagcctggactgacagataggccaagggctactctctggcatctccaggtgttttgtagcaaacagccacttagtgctttgtcctggactccactcagcctcaggatggggaatagccaagaatggcagcctcagcgcagaggcaaggtcagaaagagacggcgcttcagagtttcctttccagacacccctccccgcactgtgaagttcccctgaccgccctcctggttcacaaagagcattaagaaagctgcggtggtctgagcaacatagcccagacgtggagcctcctggcctgcctgcccgcccaccctgggagtccagtggtgaggctcagagaacttctaaggggaaagaacagctggagtttctgttgatgtgaagaaggcagctcttggcctcccactcccacacttctttgcctataaatcttcctagcagcaatttgagctacctgaggaggaggcagggcagaagggcaagggcctgcctctgacctgccgtgtcctttgcaggaaggaggtaggcacctttctgagcttattctattccccacccacacccccaggcagggttggaaatgaaggacttttttaacctttgttttgttttttaaaaataaatctgtaaaatctgaaaaaaaaaaaaaa

SEQ ID NO: 13 - DNA, 2279 bp, Human
ggcacgagcgaagatggcgtcgcccggctgcctgtggctcttggctgtggctctcctgccatggacctgcgcttctcgggcgctgcagcatctggacccgccggcgccgctgccgttggtgatctggcatgggatgggagacagctgttgcaatcccttaagcatgggtgctattaaaaaaatggtggagaagaaaatacctggaatttacgtcttatctttagagattgggaagaccctgatggaggacgtggagaacagcttcttcttgaatgtcaattcccaagtaacaacagtgtgtcaggcacttgctaaggatcctaaattgcagcaaggctacaatgctatgggattctcccagggaggccaatttctgagggcagtggctcagagatgcccttcacctcccatgatcaatctgatctcggttgggggacaacatcaaggtgtttttggactccctcgatgcccaggagagagctctcacatctgtgacttcatccgaaaaacactgaatgctggggcgtactccaaagttgttcaggaacgcctcgtgcaagccgaatactggcatgaccccataaaggaggatgtgtatcgcaaccacagcatcttcttggcagatataaatcaggagcggggtatcaatgagtcctacaagaaaaacctgatggccctgaagaagtttgtgatggtgaaattcctcaatgattccattgtggaccctgtagattcggagtggtttggattttacagaagtggccaagccaaggaaaccattcccttacaggagacctccctgtacacacaggaccgcctggggctaaaggaaatggacaatgcaggacagctagtgtttctggctacagaaggggaccatcttcagttgtctgaagaatggttttatgcccacatcataccattccttggatgaaacccgtatagttcacaatagagctcagggagcccctaactcttccaaaccacatgggagacagtttccttcatgcccaagcctgagctcagatccagcttgcaactaatccttctatcatctaacatgcactacttggaaagatctaagatctgaatcttatcctttgccatcttctgttaccatatggtgttgaatgcaagtttaattaccatggagattgttttacaaacttttgatgtggtcaagttcagttttagaaaagggagtctgttccagatcagggccagaactgtgcccaggcccaaaggagacaactaactaaagtagtgagatagattctaagggcaaacatttttccaagtcttgccatatttcaagcaaagaggtgcccaggcctgaggtactcacataaatgctttgttttgctggtgatttaaccagtgcttggaaaaatcttgcttggctatttctgcatcatttcttaaggctgccttcctctctgagtacgttgccctctgtgctatcaatcatcttatcatcaattattagacaaatcccactggcctacagtcttgcttctgcagcacccactttgtctcctcaggtagtgatgaattagttgctgtcacaaaaggagggaagtagcacccaaattaaattgcttaagagaggaaatgtacatcttgtataacttagggagcgaagaaaatgtaggcgcgaaagtgaaaagtgaggcagctagttcttcctattccattctcgaccaacctgccctttcttaatatgactagtggtcttgatgctagagtcaacttactctgttgctggctttagcagagaataggaggaaccatatgaaaaagatcaggctttctgacttccatccccaaaacacatttaccagcatactccaaactgtttctgatgtgttccatgagaaaaggattgtttgctcaaaaagcttggaaaatactacacactccctttctccttctggagatcaacccacattagagtgtctaaggactcctgagaattcctgttacagtaaacaaaactaacgtaatctaccatttcctacactatttgagcatggaaatcatagtccccactctatgaaaacttaacgctttttggaagacatttctgtagcatgtcagtttggagaaatgatgagctacgccttgatgaaagaaccgtgttggtgctgctaagtttagccattatggtttttcctttctctctcttaagccttattcttcaactaaaagatgaggattaagagcaagaagttgggggggatgtgaaaataattttatgaggttgtctaaaatctcgtgcc

SEQ ID NO: 14 - protein, 306 aa, Human
MASPGCLWLLAVALLPWTCASRALQHLDPPAPLPLVIWHGMGDSCCNPLSMGAIKKMVEKKIPGIYVLSLEIGKTLMEDVENSFFLNVNSQVTTVCQALAKDPKLQQGYNAMGFSQGGQFLRAVAQRCPSPPMINLISVGGQHQGVFGLPRCPGESSHICDFIRKTLNAGAYSKVVQERLVQAEYWHDPIKEDVYRNHSIFLADINQERGINESYKKNLMALKKFVMVKFLNDSIVDPVDSEWFGFYRSGQAKETIPLQETSLYTQDRLGLKEMDNAGQLVFLATEGDHLQLSEEWFYAHIIPFLG

SEQ ID NO: 15 - DNA, 2913 bp, Human
gggggagcccctgcaagtttcccgggccgcgcgccgcgctcgctcgcctcccagcccgcggcccgagccgccgccgcgcccgccatgccctcggccaaacaaaggggctccaagggcggccacggcgccgcgagcccctcggagaagggtgcccacccgtcgggcggcgcggatgacgtggcgaagaagccgccgccggcgccgcagcagccgccgccgccgcccgcgccgcacccgcagcagcacccgcagcagcacccgcagaaccaggcgcacggcaagggcggccaccgcggcggcggcggcggcggcggcaagtcctcctcctcctcctccgcctccgccgccgctgccgccgccgccgcctcgtcctcggcgtcctgctcgcgcaggctcggcagggcgctcaactttctcttctacctcgccctggtggcggcggccgctttctcgggctggtgcgtccaccacgtcctggaggaggtccagcaggtccggcgcagccaccaggacttctcccggcagagggaggagctgggccagggcttgcagggcgtcgagcagaaggtgcagtctttgcaagccacatttggaacttttgagtccatcttgagaagctcccaacataaacaagacctcacagagaaagctgtgaagcaaggggagagtgaggtcagccggatcagcgaagtgctgcagaaactccagaatgagattctcaaagacctctcggatgggatccatgtggtgaaggacgcccgggagcgggacttcacgtccctggagaacacggtggaggagcggctgacggagctcaccaaatccatcaacgacaacatcgccatcttcacagaagtccagaagaggagccagaaggagatcaatgacatgaaggcaaaggttgcctccctggaagaatctgaggggaacaagcaggatttgaaagccttaaaggaagctgtgaaggagatacagacctcagccaagtccagagagtgggacatggaggccctgagaagtacccttcagactatggagtctgacatctacaccgaggttcgcgagctggtgagcctcaagcaggagcagcaggctttcaaggaggcggccgacacggagcggctcgccctgcaggccctcacggagaagcttctcaggtctgaggagtccgtctcccgcctcccggaggagatccggagactggaggaagagctccgccagctgaagtccgattcccacgggccgaaggaggacggaggcttcagacactcggaagcctttgaggcactccagcaaaagagtcagggactggactccaggctccagcacgtggaggatggggtgctctccatgcaggtggcttctgcgcgccagaccgagagcctggagtccctcctgtccaagagccaggagcacgagcagcgcctggccgccctgcaggggcgcctggaaggcctcgggtcctcagaggcagaccaggatggcctggccagcacggtgaggagcctgggcgagacccagctggtgctctacggtgacgtggaggagctgaagaggagtgtgggcgagctccccagcaccgtggaatcactccagaaggtgcaggagcaggtgcacacgctgctcagtcaggaccaagcccaggccgcccgtctgcctcctcaggacttcctggacagactttcttctctagacaacctgaaagcctcagtcagccaagtggaggcggacttgaaaatgctcaggactgctgtggacagtttggttgcatactcggtcaaaatagaaaccaacgagaacaatctggaatcagccaagggtttactagatgacctgaggaatgatctggataggttgtttgtgaaagtggagaagattcacgaaaaggtctaaatgaattgcgtgtgcagggcgcggatttaaagtccaatttctcatgaccaaaaaatgtgtggttttttcccatgtgtcccctaccccccaatttcttgtcccctcttaaagagcagttgtcaccacctgaacaccaaggcattgtattttcatgcccagttaacttatttacaatatttaagttctctgcttctgcatttggttggtttcctgaagcgcagcccctgtgaataacaggtggcttttcatggatgtctctagtcagagaaaaatgataaaggcttaaattgaggattaacagaagcagattaacctcagaaatcctgtctggctggcagatttcaagtaaaaaaaaaaaaaaggtgggttggggggacccttttctttctagttgtctttaaggaaaattaattttacttttttttttgttctggccgaaatttttatgagatatctctcacttgtcttccactttgaaccggttaaagctcatagctgtcagctctgaatgaggaggggagaagcccctgggtctttctttgaaaggaatccgctgcttgagggctgcctccctcatggtgtgcgtgtcgttctcttcctgacgcatctgtgatatcagaggtaactatgcaaagcatccaggcggttctgaatgtgaagcactacacccagcagagtcccggtgccctctgtccccactgccggcccatgtcctctctccggaggtcaccaaggaatgcacaggtttcgactaccagaaaggggagtccttgggttctttcaaaaaattcgtgaggagagctgtctacagtggaatagggggtctccctggggaatgcaggccaagtccttttattttaacatgatgtccatgaagaggtttgccgtctgggcagccctgtcggcaaggagcgtgcatactgcgtttgtgtaattgtttgctgtatctcccttccctctgagctgtattgttctttaatggctgtcttgcccttccaaaaaaaattgaaaaaaaaaaaa

SEQ ID NO: 16 - protein, 602 aa, Human
MPSAKQRGSKGGHGAASPSEKGAHPSGGADDVAKKPPPAPQQPPPPPAPHPQQHPQQHPQNQAHGKGGHRGGGGGGGKSSSSSSASAAAAAAAASSSASCSRRLGRALNFLFYLALVAAAAFSGWCVHHVLEEVQQVRRSHQDFSRQREELGQGLQGVEQKVQSLQATFGTFESILRSSQHKQDLTEKAVKQGESEVSRISEVLQKLQNEILKDLSDGIHVVKDARERDFTSLENTVEERLTELTKSINDNIAIFTEVQKRSQKEINDMKAKVASLEESEGNKQDLKALKEAVKEIQTSAKSREWDMEALRSTLQTMESDIYTEVRELVSLKQEQQAFKEAADTERLALQALTEKLLRSEESVSRLPEEIRRLEEELRQLKSDSHGPKEDGGFRHSEAFEALQQKSQGLDSRLQHVEDGVLSMQVASARQTESLESLLSKSQEHEQRLAALQGRLEGLGSSEADQDGLASTVRSLGETQLVLYGDVEELKRSVGELPSTVESLQKVQEQVHTLLSQDQAQAARLPPQDFLDRLSSLDNLKASVSQVEADLKMLRTAVDSLVAYSVKIETNENNLESAKGLLDDLRNDLDRLFVKVEKIHEKV

SEQ ID NO: 17 - DNA, 2334 bp, Human
gggccctacccgccctggcgcactgctcttcccggtcatggaggcgccagccgccggcttgtttctgctcctgttgcttgggacttgggccccggcgccgggcagcgcctcctccgaggcaccgccgctgatcaatgaggacgtgaagcgcacagtggacctaagcagccacctggctaaggtgacggccgaggtggtcctggcgcacctgggcggcggctccacgtcccgagctacctctttcctgctggctttggagcctgagctcgaggcccggctggcgcacctgggcgtgcaggtaaagggagaagatgaggaagagaacaatttggaagtacgtgaaaccaaaattaagggtaaaagtgggagattcttcacagtcaagctcccagttgctcttgatcctggggccaagatttcagtcattgtggaaacagtctacacccatgtgcttcatccatatccaacccagatcacccagtcagagaaacagtttgtggtgtttgaggggaaccattatttctactctccctatccaacgaagacacaaaccatgcgtgtgaagcttgcctctcgaaatgtggagagctacaccaagctggggaaccccacgcgctctgaggacctactggattatgggcctttcagagatgtgcctgcctatagtcaggatacttttaaagtacattatgagaacaacagccctttcctgaccatcaccagcatgacccgagtcattgaagtctctcactggggtaatattgctgtggaagaaaatgtggacttaaagcacacaggagctgtgcttaaggggcctttctcacgctatgattaccagagacagccagatagtggaatatcctccatccgttcttttaagaccatccttcctgctgctgcccaggatgtttattaccgggatgagattggcaatgtttctaccagccacctccttattttggatgactctgtagagatggaaatccggcctcgcttccctctctttggcgggtggaagacccattacatcgttggctacaacctcccaagctatgagtacctctataatttgggtgaccagtatgcactgaagatgaggtttgtggaccatgtgtttgatgaacaagtgatagattctctgactgtgaagatcatcctgcctgaaggagccaagaacattgaaattgatagtccctatgaaatcagccgtgccccagatgagctgcactacacctatctggatacatttggccgccctgtgattgttgcctacaagaaaaatctggtagaacagcacattcaggacattgtggtccactacacgttcaacaaggtgctcatgctgcaggagcccctgctggtggtggcggccttctacatcctgttcttcaccgttatcatctatgttcggctggacttctccatcaccaaggatccagccgcagaagccaggatgaaggtagcctgcatcacagagcaggtcttgaccctggtcaacaagagaataggcctttaccgtcactttgacgagaccgtcaataggtacaagcaatcccgggacatctccaccctcaacagtggcaagaagagcctggagactgaacacaaggccttgaccagtgagattgcactgctgcagtccaggctgaagacagagggctctgatctgtgcgacagagtgagcgaaatgcagaagctggatgcacaggtcaaggagctggtgctgaagtcggcggtggaggctgagcgcctggtggctggcaagctcaagaaagacacgtacattgagaatgagaagctcatctcaggaaagcgccaggagctggtcaccaagatcgaccacatcctggatgccctgtagcccctgcccgcatcctccagggggcccagggtgcctgcactttgctgtggcaggcagattgggtggtagtgggaggttgtgcatggaggccagtgaaagctgacatctgtaaaaggccttcaaggaagagaaaccaggccctgcgtcaggcagtgtgagtttgccgtttgtccttaactttcttttttttttttttaaaaaagaaaactttaaaaaaactcccattaaaaacaaaacatctttgtgttttgaacaaaggaattttcaatatttgattggtattctgttctgaagtctaggatatttttcagcctataaagccccctgttttatgcccttctaattctgatgtttgggtattgtgtgagtgcatgtgttttttttttttttttttttaaagcgtgtgtgaacaaatggaaataaagcagggactgtgaacattaaaaaaaaaaaaaaaaaaaaaaaaaaaaaaa

SEQ ID NO: 18 - DNA, 2131 bp, Human
ctctttataatttagtttccatagaagttatatgtgcatttaaaaaaattcaatgctggagcgaccgtgtctggggagccgagccccgcttctcgctgcggtgagcccggactggggcacgcactgcgcagactccccgctgcagtgggcggagtcccacaggccccgcccctcctcccaccctcgttcagcctgtccagacagaagctggggcccagcggaggtagcagcagacgcctgagagcgaggccgaggccctcagggtttggagaccctgacacacccaccttctcacctgggctctgcgtatcccccagccttgagggaagatgaagcctaaactgatgtaccaggagctgaaggtgcctgcagaggagcccgccaatgagctgcccatgaatgagattgaggcgtggaaggctgcggaaaagaaagcccgctgggtcctgctggtcctcattctggcggttgtgggcttcggagcctgatgactcagctgtttctatgggaatacggcgacttgcatctctttgggcccaaccagcgcccagccccctgctatgacccttgcgaagcagtgctggtggaaagcattcctgagggcctggacttccccaatgcctccacggggaacccttccaccagccaggcctggctgggcctgctcgccggtgcgcacagcagcctggacatcgcctccttctactggaccctcaccaacaatgacacccacacgcaggagccctctgcccagcagggtgaggaggtcctccggcagctgcagaccctggcaccaaagggcgtgaacgtccgcatcgctgtgagcaagcccagcgggccccagccacaggcggacctgcaggctctgctgcagagcggtgcccaggtccgcatggtggacatgcagaagctgacccatggcgtcctgcataccaagttctgggtggtggaccagacccacttctacctgggcagtgccaacatggactggcgttcactgacccaggtcaaggagctgggcgtggtcatgtacaactgcagctgcctggctcgagacctgaccaagatctttgaggcctactggttcctgggccaggcaggcagctccatcccatcaacttggccccggttctatgacacccgctacaaccaagagacaccaatggagatctgcctcaatggaacccctgctctggcctacctggcgagtgcgcccccacccctgtgtccaagtggccgcactccagacctgaaggctctactcaacgtggtggacaatgcccggagtttcatctacgtcgctgtcatgaactacctgcccactctggagttctcccaccctcacaggttctggcctgccattgacgatgggctgcggcgggccacctacgagcgtggcgtcaaggtgcgcctgctcatcagctgctggggacactcggagccatccatgcgggccttcctgctctctctggctgccctgcgtgacaaccatacccactctgacatccaggtgaaactctttgtggtccccgcggatgaggcccaggctcgaatcccatatgcccgtgtcaaccacaacaagtacatggtgactgaacgcgccacctacatcggaacctccaactggtctggcaactacttcacggagacggcgggcacctcgctgctggtgacgcagaatgggaggggcggcctgcggagccagctggaggccattttcctgagggactgggactccccttacattcatgaccttgacacctcagctgacagcgtgggcaacgcctgccgcctgctctgaggcccgatccagtgggcaggccaaggcctgctgggcccccgcggacccaggtgctctgggtcacggtccctgtccccgcacccccgcttctgtctgccccattgtggctcctcaggctctctcccctgctctcccacctctacctccacccccaccggcctgacgctgtggccccgggacccagcagagctgggggagggatcagcccccaaagaaatgggggtgcatgctggcctgccccctggcccacccccactttccagggcaaaaagggcccagggttataataagtaaataacttgtctgtaaaaaaaaaaaaaaaaaaaaaaa

SEQ ID NO: 19 - protein, 437 aa, Human
MTQLFLWEYGDLHLFGPNQRPAPCYDPCEAVLVESIPEGLDFPNASTGNPSTSQAWLGLLAGAHSSLDIASFYWTLTNNDTHTQEPSAQQGEEVLRQLQTLAPKGVNVRIAVSKPSGPQPQADLQALLQSGAQVRMVDMQKLTHGVLHTKFWVVDQTHFYLGSANMDWRSLTQVKELGVVMYNCSCLARDLTKIFEAYWFLGQAGSSIPSTWPRFYDTRYNQETPMEICLNGTPALAYLASAPPPLCPSGRTPDLKALLNVVDNARSFIYVAVMNYLPTLEFSHPHRFWPAIDDGLRRATYERGVKVRLLISCWGHSEPSMRAFLLSLAALRDNHTHSDIQVKLFVVPADEAQARIPYARVNHNKYMVTERATYIGTSNWSGNYFTETAGTSLLVTQNGRGGLRSQLEAIFLRDWDSPYIHDLDTSADSVGNACRLL

SEQ ID NO: 20 - DNA, 536 bp, Human
  unsure 34: unknown base
  unsure 104: unknown base
  unsure 141: unknown base
  unsure 152: unknown base
  unsure 174: unknown base
  unsure 177: unknown base
  unsure 197: unknown base
  unsure 202: unknown base
  unsure 204: unknown base
  unsure 206: unknown base
  unsure 232: unknown base
  unsure 235: unknown base
  unsure 244: unknown base
  unsure 271: unknown base
  unsure 303: unknown base
  unsure 312: unknown base
  unsure 315: unknown base
  unsure 349: unknown base
  unsure 354: unknown base
  unsure 384: unknown base
  unsure 389: unknown base
  unsure 400: unknown base
  unsure 407: unknown base
  unsure 415: unknown base
  unsure 423: unknown base
  unsure 499: unknown base
actctcagaaagctggcaaagaaaaagatggtancaaaaagaaaatctttatctgacagtgaatctgatgacagcaaatcaaagaagaaaagagatgctgctgnacaaaccaagaggatttgccagaggtcttgatcctgnaaagaataatntggtgccacagacagcagtggnagnaattgatgtttctcatgaanatggnananagattcagatgaggcagacttggtgnctnggcgaaagnaggcaaatatgaagtgtcctcaaattngtaattgctttttatgaagagagactaacttnggcattctntgntccagaagatgaagctcaataattgttcacattngttcnttttatatatatttatatatatatataaanaattngggtcttaganttttgantttactangtgtgacnaaaataactacatcctaatgaaaatcaagtttgatatgtttgttttgaaagtagcgttggaagagttgttgggggnttttttgcatccatagcactggttactttgaacaaat

SEQ ID NO: 21 - DNA, 6404 bp, Human
ttacatcttatagcacccagtgaattatgatatggggctgcggtttatttgctctggcgacaatatggcttacttgccgtggaatatcccggtatttcagaagtaacatattatttttaaagagggagctttgctttctctaaatcacatggtgcaaagttgggaatacagtggcctgtaaattacaaatattatttacaaactagaaggaaagctgacatgtgtttgtgcctgtgtgacagtttcactaaggaattccaaaactgtggatagcctgttacttgagaaaaatacacggtggcagtcttgcagatgtttttcccgcctgttagccctccaggttcaaaaactgtttggtgcattttaaggcggcagtctcaccagatcgcaggattctagtctaattggcttctaaccttcaatctaaccttgccggcttccttgcaaagcccggtgcaagggcctctttcaaaatgaacccactggtgtgcctagcagtcggtagaagaagcgggagggcgtccggtctgcacgcccgccgcgaggttacaatgctgaacgcatgagatggaagataccaacgggaggccgaggggatccacggcgcccgcgcgggctccggcttcctcctgctctcggcgccgctgggcgaccgcccatgacccgctcttgcgggctctgtccggttgacaggcgaccctgtggcccggggaagcgcgggagggcgccggcggaaagttgaagagcgtttttctcgccgccgcgtgcattaggagctcgacgagtccgccctgggcttcctggtggggctgggcgggcgggggaggggccgcgcagcagcagcggaagccagacctcggcgataagaggctgcacagcgacatgcaacagtcttttcactgcagctgaatgagttgtggcgcccacaatgctcccatgacaaggagctgacaagttccattttccgtcgcgggcatcttggaatcatgactcccacaatgccttgggcacttggtcgacagtggggccgcctctgaaaaaaaaatgtgagaggttggtactaagaagtgcctttcctgacgtctctgctgcttggaaccgcttctagagcagtctctgcttttgccttgcttgctgccagctagactgtgacgacagcacatccaccctccacctctagcccagacacccccatttctacttataatcaagagaaaagctctaagtatctggcattgccctaggctgctttagtgttaaaagaaaagtttgctgaaaaagtaagatatcttctgccaggaaatcaaggaggaaaaaaaaaatcattttctcgattttgctctaaactgctgcatctgtctatgccaaactaatcaataccgattgcaccaccaaactccattgcaaattcagctgtgaggagattccctttcagacaactttgctgaaagcagcttggaaattcggtgtcgaagggtctgccacgttttcatgcttgcattttgggctccaaattggcactgggaaggggttactgagagcacaaggctgataccaggccctacttttaaacgttcatctacttacaatcctagtatttctctaaaaaccaaaacctctttgaattaacagtttcatgctgtgaatttctagtgggagatcttttccttgatattgacgacacaattttccatgtacttttaaagcagggagtggggaaaagtattttgaggggacattttcatcatcagttcagctttttttttttggttgttgctcttttttgggggggttgggtttgttggtttcactgaaacatttaactacctgtaaaatctaaacatggctgttagtgtcacaccaattcgggacacaaaatggctaacactggaagtatgtagagagttccagagggggacttgctcacggccagacacggaatgtaaatttgcacatccttcgaaaagctgccaagttgaaaatggacgagtaatcgcctgctttgattcattgaaaggccgttgctccagggagaactgcaaatatcttcatccacccccacatttaaaaacgcagttggagataaatggacgcaataacttgattcagcagaagaacatggccatgttggcccagcaaatgcaactagccaatgccatgatgcctggtgccccattacaacccgtgccaatgttttcagttgcaccaagcttagccaccaatgcatcagcagccgcctttaatccctatctgggacctgtttctccaagcctggtcccggcagagatcttgccgactgcaccaatgttggttacagggaatccgggtgtccctgtacctgcagctgctgcagctgctgcacagaaattaatgcgaacagacagacttgaggtatgtcgagagtaccaacgtggcaattgcaaccgaggagaaaatgattgtcggtttgctcatcctgctgacagcacaatgattgacaccaatgacaacacagtcactgtgtgtatggattacatcaaagggagatgctctcgggaaaagtgcaaatactttcatccccctgcacatttgcaagccaagatcaaggctgcccaataccaggtcaaccaggctgcagctgcacaggctgcagccaccgcagctgccatgggaattcctcaagctgtacttcccccattaccaaagaggcctgctcttgaaaaaaccaacggtgccaccgcagtctttaacactggtattttccaataccaacaggctctagccaacatgcagttacaacagcatacagcatttctcccaccaggctcaatattgtgcatgacacccgctacaagtgttgttcccatggtgcacggtgctacgccagccactgtgtccgcagcaacaacatctgccacaagtgttcccttcgctgcaacagccacagccaaccagatacccataatatctgccgaacatctgactagccacaagtatgttacccagatgtagaattttcatcactaaacaatcatgctaaagaggaaaggacagtgtgcttggttagagtaaaggacgaggtcattagccatattgtatatatcgtcaagcaacacacacaaaagttcctcagccacaagacatccacatattgcatgttaaccagaagaaaagacaacattttccggaaatccactgcacactgttgcctatacactttgtacatttaattgatatttgtgctgaggtgatattcctgtctaaaagaacaacattgtctttcttttctagcacagagttatgcattcaaagatgcatacctagttagtttcctatatattcatgccatcttgaaaagacagactatggtgtaaccatgattctattatgtattggtacgtctgtagaccaagatataattttttaaaaataagtttatttctttcaaggtttacaaataacaaaggtgcaccttgtatttaaaattgccattatagatgagagcgtgcatgcacagtcatttttgtttaagagtaatatttttaatgtaatagattgtaagacgtggtgagggagggatctgacagagatgaatgtgccaagcaaaaccacaactgtgtatattttaaagcacatcatggctttaagtaccatgttgttaaggattctcatgaagtgccatagactgtacatcaaattagagtattatttcttcagtgttattgttttcagagccacattttgttgcatatttgctagtactaatcagtcaaagggcaccattctttttttttttttttgaaaccaaagctgtctcagaaatggccaatttaactttacagtaacaatagacagcacaacacaaactctctcaatacagataaactcacacatactggagatatatatataatagatatatataaaattattttaatgcattgtagtgtaatatttatgcatactatactgtataacatgttattcaaaagggattgccatttctgagacacagtaacaaaaaaatgaggaaattattttgcttctatttatagcctctgtcaaaagtcaaaagactataaatgctttgcaaaaatggtttcacgtttgcttaaatgcttcatcacagtcacattcaaaatagtgactctaaacaaagaagaaagcagcactgtcatcagatgcatgataaaccaaaatatgaaaatgggaaatgtttaattaacctagtaattgggtgggttaagtacatgggtgaattttatatgtgatttttgttttgttttgttttgttcagattaactgcttatagccttagaaagccttttacaaaattaaaaaaaaaatagatgtgcattcagtttttaagaatggaatcatccaaaggaattcctttttttgaggtttggatgttgcagctagtaaaggatatttttgctctgttcagcagttctaaaaattgctgaagtaggggccaggtcactggtagttatagtatggaatgggagaagtgaaagttcagttatagaactttccatacttccaagtttactgcaagtttttatgcttgagagagatgctttctaatataagactgatgtgttgattttactgattgtactgtacatctattaaagccttagattattacattacgggttggaacccataccaatgtaatttcaatcgtgttaagaaagtaatggtgacttcacatgttattgtagttagttacattatagaatattacttatttttcttgttaaaatgtagtttttcatttcctacatttattagattttcattttctattaacaattgaataccatttcagtttatagacttgttttattagattttaccaatgaatttttcaaaatacaaaaaaaagtagtttttccttcataacatactcagttttgaattacatgtagtgtcacatgaatattcgtattgttaactaaatgatttatattttactgatttaatattacagtgtaagaatgtcagtcattgttagttcttgtctagttttcattaaaagaacaaagatcttttatatggatatcttataaatatataatcattgctaagtaagaagttaagttgttgctatcgcaacaatcctggcagacaattgagtaatattttgatgatttattttgtttgtaattagttattataagaagatctagatcctagatattagaataaaatttattttctactgtatccatttcaaatgttaaaatattgtttaatatttttgaaatccctgagtatcaggccttgttataaataagctgcataatcaataaatagaacaagggactttttgttgataatccaaatactcaaagtttacgtaatgaaaattatagcgtgtgtgcaaactcttgagggttgattatgctgcaatttagcatgttggaacgtctagggagaaggttgactttttgcacttctgtatatagtcaaaagagagaaacctgtataatagtaagatcttattttgaataaaaacgtctataattacaaggagttttgttaaggctaatacaatgacagactgagcaaaattgcttgcaaaagtggcacagagttagcactccataccccttcaaacatgttgctttgctttcttgtggacagcttgtagtttgccaggattttttcagctggaaagatacgccatcctttcaaaccctcatgactgacaaaaactccatggggccaaatctgcctgaagatcattaccaaaaatagcaggtacttctaccattaaggtgaaatcatggatcagatattccttacatttttcaaaactactgcatgtttaaaacttcaacaaaaaaagagagaaagaactatactaagaacatatattattcagatcagtttctgccaatttcagtggtttattgttcacaaaaaaatcttcaaaacaagtattgactttcacaaaatttaaatcataaacaggcaaaccaaacagcacactgtagctatagttgttatgtgattgttttttaattgctgtaggatcctgttctttcagcaggtgaaaaataaaacgcagttcaaatttcatggttttaattttcaactcagaagcactcaaaaatgcaaaatgtgataatgggcacttgtttaaaagaattagtgtatccagccttcactccagctggttaaaaatgttgcacttatcagcaaccctaccactttcatctgctgaaaggacaaatgtgcttggttttactattatgtaatcacaacttactttctgcttgtagttgcttaaaattatgtattttgtcttgggctgcaatttgttttatgcttattttattattactgcagtagttgactttgctgtatggaaaaataaagtgaaattgccctaataaaacttctctttcttaagt

SEQ ID NO: 22 - DNA, 2922 bp, Human
ggacaccgggccatgcacgcccccaactgaagctgcatctcaaagccgaagattccagcagcccaggggatttcaaagagctcagactcagaggaacatctgcggagagacccccgaagccctctccagggcagtcctcatccagacgctccgctagtgcagacaggagcgcgcagtggccccggctcgccgcgccatggagcggatccccagcgcgcaaccaccccccgcctgcctgcccaaagcaccgggactggagcacggagacctaccagggatgtaccctgcccacatgtaccaagtgtacaagtcaagacggggaataaagcggagcgaggacagcaaggagacctacaaattgccgcaccggctcatcgagaaaaagagacgtgaccggattaacgagtgcatcgcccagctgaaggatctcctacccgaacatctcaaacttacaactttgggtcacttggaaaaagcagtggttcttgaacttaccttgaagcatgtgaaagcactaacaaacctaattgatcagcagcagcagaaaatcattgccctgcagagtggtttacaagctggtgagctgtcagggagaaatgtcgaaacaggtcaagagatgttctgctcaggtttccagacatgtgcccgggaggtgcttcagtatctggccaagcacgagaacactcgggacctgaagtcttcgcagcttgtcacccacctccaccgggtggtctcggagctgctgcagggtggtacctccaggaagccatcagacccagctcccaaagtgatggacttcaaggaaaaacccagctctccggccaaaggttcggaaggtcctgggaaaaactgcgtgccagtcatccagcggactttcgctcactcgagtggggagcagagcggcagcgacacggacacagacagtggctatggaggagaatcggagaagggcgacttgcgcagtgagcagccgtgcttcaaaagtgaccacggacgcaggttcacgatgggagaaaggatcggcgcaattaagcaagagtccgaagaaccccccacaaaaaagaaccggatgcagctttcggatgatgaaggccatttcactagcagtgacctgatcagctccccgttcctgggcccacacccacaccagcctcctttctgcctgcccttctacctgatcccaccttcagcgactgcctacctgcccatgctggagaagtgctggtatcccacctcagtgccagtgctatacccaggcctcaacgcctctgccgcagccctctctagcttcatgaacccagacaagatctcggctcccttgctcatgccccagagactcccttctcccttgccagctcatccgtccgtcgactcttctgtcttgctccaagctctgaagccaatcccccctttaaacttagaaaccaaagactaaactctctaggggatcctgctgctttgctttccttcctcgctacttcctaaaaagcaacaaaaaagtttttgtgaatgctgcaagattgttgcattgtgtatactgagataatctgaggcatggagagcagattcagggtgtgtgtgtgtgtgtgtgtgtgtgtgtgtatgtgcgtgtgcgtgcacatgtgtgcctgcgtgttggtataggactttaaagctccttttggcatagggaagtcacgaaggattgcttgacatcaggagacttgggggggattgtagcagacgtctgggcttttccccacccagagaatagcccccttcgatacacatcagctggattttcaaaagcttcaaagtcttggtctgtgagtcactcttcagtttgggagctgggtctgtggctttgatcagaaggtactttcaaaagagggctttccagggctcagctcccaaccagctgttaggaccccacccttttgcctttattgtcgacgtgactcaccagacgtcggggagagagagcagtcagaccgagctttctgctaacatggggaggtagcaggcactggcatagcacggtagtggtttggggaggtttccgcaggtctgctccccacccctgcctcggaagaataaagagaatgtagttccctactcaggctttcgtagtgattagcttactaaggaactgaaaatgggccccttgtacaagctgagctgccccggagggagggaggagttccctgggcttctggcacctgtttctaggcctaaccattagtacttactgtgcagggaaccaaaccaaggtctgagaaatgcggacaccccgagcgagcaccccaaagtgcacaaagctgagtaaaaagctgcccccttcaaacagaactagactcagttttcaattccatcctaaaactccttttaaccaagcttagcttctcaaaggcctaaccaagccttggcaccgccagatcctttctgtaggctaattcctcttgcccaacggcatatggagtgtccttattgctaaaaaggattccgtctccttcaaagaagttttatttttggtccagagtacttgttttcccgatgtgtccagccagctccgcagcagcttttcaagatgcactatgcctgattgctgatcgtgttttaactttttcttttcctgtttttattttggtattaagtcgttgcctttatttgtaaagctgttataaatatatattatataaatatattaaaaaggaaaatgtttcagatgtttatttgtataattacttgattcacacagtgagaaaaaatgaatgtattcctgtttttgaagagaagaataatttttttttctctagggagaggtacagtgtttatattttggagccttcctgaaggtgtaaaattgtaaatatttttatctatgagtaaatgttaagtagttgttttaaaatacttaataaaataattcttttcctgtggaag

SEQ ID NO: 23 - protein, 412 aa, Human
MERIPSAQPPPACLPKAPGLEHGDLPGMYPAHMYQVYKSRRGIKRSEDSKETYKLPHRLIEKKRRDRINECIAQLKDLLPEHLKLTTLGHLEKAVVLELTLKHVKALTNLIDQQQQKIIALQSGLQAGELSGRNVETGQEMFCSGFQTCAREVLQYLAKHENTRDLKSSQLVTHLHRVVSELLQGGTSRKPSDPAPKVMDFKEKPSSPAKGSEGPGKNCVPVIQRTFAHSSGEQSGSDTDTDSGYGGESEKGDLRSEQPCFKSDHGRRFTMGERIGAIKQESEEPPTKKNRMQLSDDEGHFTSSDLISSPFLGPHPHQPPFCLPFYLIPPSATAYLPMLEKCWYPTSVPVLYPGLNASAAALSSFMNPDKISAPLLMPQRLPSPLPAHPSVDSSVLLQALKPIPPLNLETKD

SEQ ID NO: 24 - DNA, 1370 bp, Human
ggcggcggcagctgtacagggcgggagaagcggtggtagcggaggctgtagtggggctggtggtgcttccaactgcgggacaggaagtggccgtagcggcttgttggataagtggaagatagatgataagcctgtaaaaattgacaagtgggatggatcagctgtgaaaaactctttggatgattctgccaaaaaggtacttctggaaaaatacaaatatgtggagaattttggtctaattgatggtcgcctcaccatctgtacaatctcctgtttctttgccatagtggctttgatttgggattatatgcacccctttccagagtccaaacccgttttggctttgtgtgtcatatcctattttgtgatgatggggattctgaccatttatacctcatataaggagaagagcatctttctcgtggcccacaggaaagatcctacaggaatggatcctgatgatatttggcagctgtcctccagtcttaaaaggtttgatgacaaatacaccttgaagctgaccttcatcagtgggagaacaaagcagcagcgggaagccgagttcacaaagtccattgctaagttttttgaccacagtgggacactggtcatggatgcatatgagcctgaaatatccaggctccatgacagtcttgccatagaaagaaaaataaagtagccaattctaaaagtagccctctttctcctggatcttgctgaattagtggcttggggggtgggggagataaaaagaacttaaaatgggtaaagtaagaaatgttaaaaagtccctgttttgtcctgaaattttagtctattctgggtaaataggattttctgacacagatatgagaagttgtagctctgatgtctagctgtagtctccttgatctgctgattgcattattttaatttgcttttctgggaaagcagttttgctaaaagctgtacagactttttcttttgtacctagcagtactttatatagtatagctttgggccatgtagcattttaagactcaattttaaaaaattattaatctgttgctgactcttaattcctatttcaatatgtgtttccttgaagaattcaggatacaacttcttgtgtatgacagctttccttcacacactatttttgtgggtgtgtatatatctgatttgggaagaatttaaaaaacacatagctttttaatttgtttgaaacagactttctgcctgttacatttttgcttttaaccaattaaagaagccaatggcattttagttttatattgtgttttccactagtatatccctgttgatttgtttgtgccttttattaactgccattttctaaaatttttttcaataaaaggaaggaagatgtg

SEQ ID NO: 25 - protein, 123 aa, Human
MHPFPESKPVLALCVISYFVMMGILTIYTSYKEKSIFLVAHRKDPTGMDPDDIWQLSSSLKRFDDKYTLKLTFISGRTKQQREAEFTKSIAKFFDHSGTLVMDAYEPEISRLHDSLAIERKIK

SEQ ID NO: 26 - DNA, 1906 bp, Human
gcggcggcggcggcggcggcggtgacggccgggaagggtcagttggaggcaggcgctcgctgaggcaaaaggaggcgctcggcccgcggcctgacagggacttagcccgcagagatcgaccccgcgcgcgtgaccccacacccacccactcatccatctatccactccctgcgccgcctcctcccaccctgagcagagccgccgaggatgataaacacccaggacagtagtattttgcctttgagtaactgtccccagctccagtgctgcaggcacattgttccagggcctctgtggtgctcctgatgcccctcacccactgtcgaagatccccggtgggcgagggggcggcagggatccttctctctcagctctaatatataaggacgagaagctcactgtgacccaggacctccctgtgaatgatggaaaacctcacatcgtccacttccagtatgaggtcaccgaggtgaaggtctcttcttgggatgcagtcctgtccagccagagcctgtttgtagaaatcccagatggattattagctgatgggagcaaagaaggattgttagcactgctagagtttgctgaagagaagatgaaagtgaactatgtcttcatctgcttcaggaagggccgagaagacagagctccactcctgaagaccttcagcttcttgggctttgagattgtacgtccaggccatccctgtgtcccctctcggccagatgtgatgttcatggtttatcccctggaccagaacttgtccgatgaggactaatagtcatagaggatgctttacccaagagccacagtgggggaagaggggaagttaggcagccctgggacagacgagagggctcctcgctgtctagggaaggacactgaggggctcagggtgagggttgcctattgtgttctcggagttgactcgttgaaattgttttccataaagaacagtataaacatattattcacatgtaatcaccaatagtaaatgaagatgtttatgaactggcattagaagctttctaaactgcgctgtgtgatgtgttctatctagcctaggggaggacattgcctagagggggagggactgtctgggttcaggggcatggcctggagggctggtgggcagcactgtcaggctcaggtttccctgctgttggctttctgttttggttattaagacttgtgtattttctttctttgcttcctgtcaccccaggggctcctgagtataggcttttcagtccctgggcagtgtccttgagttgttttttgacactcttacctgggcttctctgtgtgcatttgcgtctggcctggagtaagcaggtccgacccctcgttctttacagcttagtgttattctggcatttggttaagctggcttaatcttgtttaatgttatcagtacattttaaataggggcattgaaatttactcccaccaccagggcttttttgggggatgcctgggcctttaaaacactagccaaactctaattaattctcaaatcactgccaggagttcttgctcctggctgcaggcccaggccccaaggtctccttcttggggtcacaaacagcagtaaggaagaggaatatatagcaactcagggcctgggaattgtggggcaatccgttcttagggactggatacttctggctggctgagtatagtactagctgcctccccaccaggttccgagtagtgtctgagactctgctctgcagggcctagggtagcgctgggagtgtagaagtggcctgcccttaactgttttcactaaacagctttttctaaggggagagcaagggggagagatctagattgggtgagggggacggggatgtcagggaggcaagtgtgttgtgttactgtgtcaataaactgatttaaagtt

SEQ ID NO: 27 - DNA, 9090 bp, Human
cgagcccagtcgagccgcgctcacctcgggctcccgctccgtctccacctccgcctttgccctggcggcgcgaccccgtcccggcgcggcccccagcagtcgcgcgccgttagcctcgcgcccgccgcgcagtccgggcccggcgcgatgggggccgccgccggccggagcccccacctggggcccgcgcccgcccgccgcccgcagcgctctctgctcctgctgcagctgctgctgctcgtcgctgccccggggtccacgcaggcccaggccgccccgttccccgagctgtgcagttatacatgggaagctgttgataccaaaaataatgtactttataaaatcaacatctgtggaagtgtggatattgtccagtgcgggccatcaagtgctgtttgtatgcacgacttgaagacacgcacttatcattcagtgggtgactctgttttgagaagtgcaaccagatctctcctggaattcaacacaacagtgagctgtgaccagcaaggcacaaatcacagagtccagagcagcattgccttcctgtgtgggaaaaccctgggaactcctgaatttgtaactgcaacagaatgtgtgcactactttgagtggaggaccactgcagcctgcaagaaagacatatttaaagcaaataaggaggtgccatgctatgtgtttgatgaagagttgaggaagcatgatctcaatcctctgatcaagcttagtggtgcctacttggtggatgactccgatccggacacttctctattcatcaatgtttgtagagacatagacacactacgagacccaggttcacagctgcgggcctgtccccccggcactgccgcctgcctggtaagaggacaccaggcgtttgatgttggccagccccgggacggactgaagctggtgcgcaaggacaggcttgtcctgagttacgtgagggaagaggcaggaaagctagacttttgtgatggtcacagccctgcggtgactattacatttgtttgcccgtcggagcggagagagggcaccattcccaaactcacagctaaatccaactgccgctatgaaattgagtggattactgagtatgcctgccacagagattacctggaaagtaaaacttgttctctgagcggcgagcagcaggatgtctccatagacctcacaccacttgcccagagcggaggttcatcctatatttcagatggaaaagaatatttgttttatttgaatgtctgtggagaaactgaaatacagttctgtaataaaaaacaagctgcagtttgccaagtgaaaaagagcgatacctctcaagtcaaagcagcaggaagataccacaatcagaccctccgatattcggatggagacctcaccttgatatattttggaggtgatgaatgcagctcagggtttcagcggatgagcgtcataaactttgagtgcaataaaaccgcaggtaacgatgggaaaggaactcctgtattcacaggggaggttgactgcacctacttcttcacatgggacacggaatacgcctgtgttaaggagaaggaagacctcctctgcggtgccaccgacgggaagaagcgctatgacctgtccgcgctggtccgccatgcagaaccagagcagaattgggaagctgtggatggcagtcagacggaaacagagaagaagcattttttcattaatatttgtcacagagtgctgcaggaaggcaaggcacgagggtgtcccgaggacgcggcagtgtgtgcagtggataaaaatggaagtaaaaatctgggaaaatttatttcctctcccatgaaagagaaaggaaacattcaactctcttattcagatggtgatgattgtggtcatggcaagaaaattaaaactaatatcacacttgtatgcaagccaggtgatctggaaagtgcaccagtgttgagaacttctggggaaggcggttgcttttatgagtttgagtggcgcacagctgcggcctgtgtgctgtctaagacagaaggggagaactgcacggtctttgactcccaggcagggttttcttttgacttatcacctctcacaaagaaaaatggtgcctataaagttgagacaaagaagtatgacttttatataaatgtgtgtggcccggtgtctgtgagcccctgtcagccagactcaggagcctgccaggtggcaaaaagtgatgagaagacttggaacttgggtctgagtaatgcgaagctttcatattatgatgggatgatccaactgaactacagaggcggcacaccctataacaatgaaagacacacaccgagagctacgctcatcacctttctctgtgatcgagacgcgggagtgggcttccctgaatatcaggaagaggataactccacctacaacttccggtggtacaccagctatgcctgcccggaggagcccctggaatgcgtagtgaccgacccctccacgctggagcagtacgacctctccagtctggcaaaatctgaaggtggccttggaggaaactggtatgccatggacaactcaggggaacatgtcacgtggaggaaatactacattaacgtgtgtcggcctctgaatccagtgccgggctgcaaccgatatgcatcggcttgccagatgaagtatgaaaaagatcagggctccttcactgaagtggtttccatcagtaacttgggaatggcaaagaccggcccggtggttgaggacagcggcagcctccttctggaatacgtgaatgggtcggcctgcaccaccagcgatggcagacagaccacatataccacgaggatccatctcgtctgctccaggggcaggctgaacagccaccccatcttttctctcaactgggagtgtgtggtcagtttcctgtggaacacagaggctgcctgtcccattcagacaacgacggatacagaccaggcttgctctataagggatcccaacagtggatttgtgtttaatcttaatccgctaaacagttcgcaaggatataacgtctctggcattgggaagatttttatgtttaatgtctgcggcacaatgcctgtctgtgggaccatcctgggaaaacctgcttctggctgtgaggcagaaacccaaactgaagagctcaagaattggaagccagcaaggccagtcggaattgagaaaagcctccagctgtccacagagggcttcatcactctgacctacaaagggcctctctctgccaaaggtaccgctgatgcttttatcgtccgctttgtttgcaatgatgatgtttactcagggcccctcaaattcctgcatcaagatatcgactctgggcaagggatccgaaacacttactttgagtttgaaaccgcgttggcctgtgttccttctccagtggactgccaagtcaccgacctggctggaaatgagtacgacctgactggcctaagcacagtcaggaaaccttggacggctgttgacacctctgtcgatgggagaaagaggactttctatttgagcgtttgcaatcctctcccttacattcctggatgccagggcagcgcagtggggtcttgcttagtgtcagaaggcaatagctggaatctgggtgtggtgcagatgagtccccaagccgcggcgaatggatctttgagcatcatgtatgtcaacggtgacaagtgtgggaaccagcgcttctccaccaggatcacgtttgagtgtgctcagatatcgggctcaccagcatttcagcttcaggatggttgtgagtacgtgtttatctggagaactgtggaagcctgtcccgttgtcagagtggaaggggacaactgtgaggtgaaagacccaaggcatggcaacttgtatgacctgaagcccctgggcctcaacgacaccatcgtgagcgctggcgaatacacttattacttccgggtctgtgggaagctttcctcagacgtctgccccacaagtgacaagtccaaggtggtctcctcatgtcaggaaaagcgggaaccgcagggatttcacaaagtggcaggtctcctgactcagaagctaacttatgaaaatggcttgttaaaaatgaacttcacggggggggacacttgccataaggtttatcagcgctccacagccatcttcttctactgtgaccgcggcacccagcggccagtatttctaaaggagacttcagattgttcctacttgtttgagtggcgaacgcagtatgcctgcccacctttcgatctgactgaatgttcattcaaagatggggctggcaactccttcgacctctcgtccctgtcaaggtacagtgacaactgggaagccatcactgggacgggggacccggagcactacctcatcaatgtctgcaagtctctggccccgcaggctggcactgagccgtgccctccagaagcagccgcgtgtctgctgggtggctccaagcccgtgaacctcggcagggtaagggacggacctcagtggagagatggcataattgtcctgaaatacgttgatggcgacttatgtccagatgggattcggaaaaagtcaaccaccatccgattcacctgcagcgagagccaagtgaactccaggcccatgttcatcagcgccgtggaggactgtgagtacacctttgcctggcccacagccacagcctgtcccatgaagagcaacgagcatgatgactgccaggtcaccaacccaagcacaggacacctgtttgatctgagctccttaagtggcagggcgggattcacagctgcttacagcgagaaggggttggtttacatgagcatctgtggggagaatgaaaactgccctcctggcgtgggggcctgctttggacagaccaggattagcgtgggcaaggccaacaagaggctgagatacgtggaccaggtcctgcagctggtgtacaaggatgggtccccttgtccctccaaatccggcctgagctataagagtgtgatcagtttcgtgtgcaggcctgaggccgggccaaccaataggcccatgctcatctccctggacaagcagacatgcactctcttcttctcctggcacacgccgctggcctgcgagcaagcgaccgaatgttccgtgaggaatggaagctctattgttgacttgtctccccttattcatcgcactggtggttatgaggcttatgatgagagtgaggatgatgcctccgataccaaccctgatttctacatcaatatttgtcagccactaaatcccatgcacgcagtgccctgtcctgccggagccgctgtgtgcaaagttcctattgatggtccccccatagatatcggccgggtagcaggaccaccaatactcaatccaatagcaaatgagatttacttgaattttgaaagcagtactccttgcttagcggacaagcatttcaactacacctcgctcatcgcgtttcactgtaagagaggtgtgagcatgggaacgcctaagctgttaaggaccagcgagtgcgactttgtgttcgaatgggagactcctgtcgtctgtcctgatgaagtgaggatggatggctgtaccctgacagatgagcagctcctctacagcttcaacttgtccagcctttccacgagcacctttaaggtgactcgcgactcgcgcacctacagcgttggggtgtgcacctttgcagtcgggccagaacaaggaggctgtaaggacggaggagtctgtctgctctcaggcaccaagggggcatcctttggacggctgcaatcaatgaaactggattacaggcaccaggatgaagcggtcgttttaagttacgtgaatggtgatcgttgccctccagaaaccgatgacggcgtcccctgtgtcttccccttcatattcaatgggaagagctacgaggagtgcatcatagagagcagggcgaagctgtggtgtagcacaactgcggactacgacagagaccacgagtggggcttctgcagacactcaaacagctaccggacatccagcatcatatttaagtgtgatgaagatgaggacattgggaggccacaagtcttcagtgaagtgcgtgggtgtgatgtgacatttgagtggaaaacaaaagttgtctgccctccaaagaagttggagtgcaaattcgtccagaaacacaaaacctacgacctgcggctgctctcctctctcaccgggtcctggtccctggtccacaacggagtctcgtactatataaatctgtgccagaaaatatataaagggcccctgggctgctctgaaagggccagcatttgcagaaggaccacaactggtgacgtccaggtcctgggactcgttcacacgcagaagctgggtgtcataggtgacaaagttgttgtcacgtactccaaaggttatccgtgtggtggaaataagaccgcatcctccgtgatagaattgacctgtacaaagacggtgggcagacctgcattcaagaggtttgatatcgacagctgcacttactacttcagctgggactcccgggctgcctgcgccgtgaagcctcaggaggtgcagatggtgaatgggaccatcaccaaccctataaatggcaagagcttcagcctcggagatatttattttaagctgttcagagcctctggggacatgaggaccaatggggacaactacctgtatgagatccaactttcctccatcacaagctccagaaacccggcgtgctctggagccaacatatgccaggtgaagcccaacgatcagcacttcagtcggaaagttggaacctctgacaagaccaagtactaccttcaagacggcgatctcgatgtcgtgtttgcctcttcctctaagtgcggaaaggataagaccaagtctgtttcttccaccatcttcttccactgtgaccctctggtggaggacgggatccccgagttcagtcacgagactgccgactgccagtacctcttctcttggtacacctcagccgtgtgtcctctgggggtgggctttgacagcgagaatcccggggacgacgggcagatgcacaaggggctgtcagaacggagccaggcagtcggcgcggtgctcagcctgctgctggtggcgctcacctgctgcctgctggccctgttgctctacaagaaggagaggagggaaacagtgataagtaagctgaccacttgctgtaggagaagttccaacgtgtcctacaaatactcaaaggtgaataaggaagaagagacagatgagaatgaaacagagtggctgatggaagagatccagctgcctcctccacggcagggaaaggaagggcaggagaacggccatattaccaccaagtcagtgaaagccctcagctccctgcatggggatgaccaggacagtgaggatgaggttctgaccatcccagaggtgaaagttcactcgggcaggggagctggggcagagagctcccacccagtgagaaacgcacagagcaatgcccttcaggagcgtgaggacgatagggtggggctggtcaggggtgagaaggcgaggaaagggaagtccagctctgcacagcagaagacagtgagctccaccaagctggtgtccttccatgacgacagcgacgaggacctcttacacatctgactccgcagtgcctgcaggggagcacggagccgcgggacagccaagcacctccaaccaaataagacttccactcgatgatgcttctataattttgcctttaacagaaactttcaaaagggaagagtttttgtgatgggggagagggtgaaggaggtcaggccccactccttcctgattgtttacagtcattggaataaggcatggctcagatcggccacagggcggtaccttgtgcccagggttttgccccaagtcctcatttaaaagcataaggccggacgcatctcaaaacagagggctgcattcgaagaaacccttgctgctttagtcccgatagggtatttgaccccgatatattttagcattttaattctctccccctatttattgactttgacaattactcaggtttgagaaaaaggaaaaaaaaacagccaccgtttcttcctgccagcaggggtgtgatgtaccagtttgtccatcttgagatggtgaggctgtcagtgtatggggcagcttccggcgggatgttgaactggtcattaatgtgtcccctgagttggagctcattctgtctcttttctcttttgctttctgtttcttaagggcacacacacgtgcgtgcgagcacacacacacatacgtgcacagggtccccgagtgcctaggttttggagagtttgcctgttctatgcctttagtcaggaatggctgcacctttttgcatgatatcttcaagcctgggcgtacagagcacatttgtcagtatttttgccggctggtgaattcaaacaacctgcccaaagattgatttgtgtgtttgtgtgtgtgtgtgtgtgtgtgtgtgtgtgtgagtggagttgaggtgtcagagaaaatgaattttttccagatttggggtataggtctcatctcttcaggttctcatgataccacctttactgtgcttatttttttaagaaaaaagtgttgatcaaccattcgacctataagaagccttaatttgcacagtgtgtgacttacagaaactgcatgaaaaatcatgggccagagcctcggccctagcattgcacttggcctcatgctggagggaggctgggcgggtacagcgcggaggaggagggaggccaggcgggcatggcgtggaggaggagggaggccgggcggtcacagcatggaggaggagggaggcgctgctggtgttcttattctggcggcagcgcctttcctgccatgtttagtgaatgacttttctcgcattgtagaattgtatatagactctggtgttctattgctgagaagcaaaccgccctgcagcatccctcagcctgtaccggtttggctggcttgtttgatttcaacatgagtgtattttttaaaattgatttttctcttcatttttttttcaatcaactttactgtaatataaagtattcaacaatttcaataaaagataaattattaaaa

SEQ ID NO: 28 - protein, 2491 aa, Human
MGAAAGRSPHLGPAPARRPQRSLLLLQLLLLVAAPGSTQAQAAPFPELCSYTWEAVDTKNNVLYKINICGSVDIVQCGPSSAVCMHDLKTRTYHSVGDSVLRSATRSLLEFNTTVSCDQQGTNHRVQSSIAFLCGKTLGTPEFVTATECVHYFEWRTTAACKKDIFKANKEVPCYVFDEELRKHDLNPLIKLSGAYLVDDSDPDTSLFINVCRDIDTLRDPGSQLRACPPGTAACLVRGHQAFDVGQPRDGLKLVRKDRLVLSYVREEAGKLDFCDGHSPAVTITFVCPSERREGTIPKLTAKSNCRYEIEWITEYACHRDYLESKTCSLSGEQQDVSIDLTPLAQSGGSSYISDGKEYLFYLNVCGETEIQFCNKKQAAVCQVKKSDTSQVKAAGRYHNQTLRYSDGDLTLIYFGGDECSSGFQRMSVINFECNKTAGNDGKGTPVFTGEVDCTYFFTWDTEYACVKEKEDLLCGATDGKKRYDLSALVRHAEPEQNWEAVDGSQTETEKKHFFINICHRVLQEGKARGCPEDAAVCAVDKNGSKNLGKFISSPMKEKGNIQLSYSDGDDCGHGKKIKTNITLVCKPGDLESAPVLRTSGEGGCFYEFEWRTAAACVLSKTEGENCTVFDSQAGFSFDLSPLTKKNGAYKVETKKYDFYINVCGPVSVSPCQPDSGACQVAKSDEKTWNLGLSNAKLSYYDGMIQLNYRGGTPYNNERHTPRATLITFLCDRDAGVGFPEYQEEDNSTYNFRWYTSYACPEEPLECVVTDPSTLEQYDLSSLAKSEGGLGGNWYAMDNSGEHVTWRKYYINVCRPLNPVPGCNRYASACQMKYEKDQGSFTEVVSISNLGMAKTGPVVEDSGSLLLEYVNGSACTTSDGRQTTYTTRIHLVCSRGRLNSHPIFSLNWECVVSFLWNTEAACPIQTTTDTDQACSIRDPNSGFVFNLNPLNSSQGYNVSGIGKIFMFNVCGTMPVCGTILGKPASGCEAETQTEELKNWKPARPVGIEKSLQLSTEGFITLTYKGPLSAKGTADAFIVRFVCNDDVYSGPLKFLHQDIDSGQGIRNTYFEFETALACVPSPVDCQVTDLAGNEYDLTGLSTVRKPWTAVDTSVDGRKRTFYLSVCNPLPYIPGCQGSAVGSCLVSEGNSWNLGVVQMSPQAAANGSLSIMYVNGDKCGNQRFSTRITFECAQISGSPAFQLQDGCEYVFIWRTVEACPVVRVEGDNCEVKDPRHGNLYDLKPLGLNDTIVSAGEYTYYFRVCGKLSSDVCPTSDKSKVVSSCQEKREPQGFHKVAGLLTQKLTYENGLLKMNFTGGDTCHKVYQRSTAIFFYCDRGTQRPVFLKETSDCSYLFEWRTQYACPPFDLTECSFKDGAGNSFDLSSLSRYSDNWEAITGTGDPEHYLINVCKSLAPQAGTEPCPPEAAACLLGGSKPVNLGRVRDGPQWRDGIIVLKYVDGDLCPDGIRKKSTTIRFTCSESQVNSRPMFISAVEDCEYTFAWPTATACPMKSNEHDDCQVTNPSTGHLFDLSSLSGRAGFTAAYSEKGLVYMSICGENENCPPGVGACFGQTRISVGKANKRLRYVDQVLQLVYKDGSPCPSKSGLSYKSVISFVCRPEAGPTNRPMLISLDKQTCTLFFSWHTPLACEQATECSVRNGSSIVDLSPLIHRTGGYEAYDESEDDASDTNPDFYINICQPLNPMHAVPCPAGAAVCKVPIDGPPIDIGRVAGPPILNPIANEIYLNFESSTPCLADKHFNYTSLIAFHCKRGVSMGTPKLLRTSECDFVFEWETPVVCPDEVRMDGCTLTDEQLLYSFNLSSLSTSTFKVTRDSRTYSVGVCTFAVGPEQGGCKDGGVCLLSGTKGASFGRLQSMKLDYRHQDEAVVLSYVNGDRCPPETDDGVPCVFPFIFNGKSYEECIIESRAKLWCSTTADYDRDHEWGFCRHSNSYRTSSIIFKCDEDEDIGRPQVFSEVRGCDVTFEWKTKVVCPPKKLECKFVQKHKTYDLRLLSSLTGSWSLVHNGVSYYINLCQKIYKGPLGCSERASICRRTTTGDVQVLGLVHTQKLGVIGDKVVVTYSKGYPCGGNKTASSVIELTCTKTVGRPAFKRFDIDSCTYYFSWDSRAACAVKPQEVQMVNGTITNPINGKSFSLGDIYFKLFRASGDMRTNGDNYLYEIQLSSITSSRNPACSGANICQVKPNDQHFSRKVGTSDKTKYYLQDGDLDVVFASSSKCGKDKTKSVSSTIFFHCDPLVEDGIPEFSHETADCQYLFSWYTSAVCPLGVGFDSENPGDDGQMHKGLSERSQAVGAVLSLLLVALTCCLLALLLYKKERRETVISKLTTCCRRSSNVSYKYSKVNKEEETDENETEWLMEEIQLPPPRQGKEGQENGHITTKSVKALSSLHGDDQDSEDEVLTIPEVKVHSGRGAGAESSHPVRNAQSNALQEREDDRVGLVRGEKARKGKSSSAQQKTVSSTKLVSFHDDSDEDLLHI

SEQ ID NO: 29 - DNA, 2808 bp, Human
agcgggcggcccggcggctgcgtactggctgtgggatgggaagtgaagccccagcgagcggctgcagcggggccgtgaggagcagccagcgggaggcggcggcgagtcggtgagcagctgggaagagcagaaccggggcggagcacctgcaggcgcgggcggcggccccaccatggcgattcgcaagaaaagcaccaagagccccccagtgctgagccacgaattcgtcctgcagaatcacgcggacatcgtctcctgtgtggcgatggtcttcctgctggggctcatgtttgagataacggcaaaagcttctatcatttttgttactcttcagtacaatgtcaccctcccagcaacagaagaacaagctactgaatcagtgtccctttattactatggcatcaaagatttggctactgttttcttctacatgctagtggcgataattattcatgccgtaattcaagagtatatgttggataaaattaacaggcgaatgcacttctccaaaacaaaacacagcaagtttaatgaatctggtcagcttagtgcgttctacctttttgcctgtgtttggggcacattcattctcatctctgaaaactacatctcagacccaactatcttatggagggcttatccccataacctgatgacatttcaaatgaagtttttctacatatcacagctggcttactggcttcatgcttttcctgaactctacttccagaaaaccaaaaaagaagatattcctcgtcagcttgtctacattggtctttacctcttccacattgctggagcttaccttttgaacttgaatcatctaggacttgttcttctggtgctacattattttgttgaatttcttttccacatttcccgcctgttttattttagcaatgaaaagtatcagaaaggattttctctgtgggcagttctttttgttttgggaagacttctgactttaattctttcagtactgactgttggttttggccttgcaagagcagaaaatcagaagctggatttcagtactggaaacttcaatgtgttagctgttagaatcgctgttctggcatccatttgcgttactcaggcatttatgatgtggaagttcattaattttcagcttcgaaggtggagggaacattctgcttttcaggcaccagctgtgaagaagaaaccaacagtaactaaaggcagatcttctaaaaaaggaacagaaaatggtgtgaatggaacattaacttcaaatgtagcagactctccccggaataaaaaagagaaatcttcataatgaattataaactaattgattaatgtccccaaagaaatctgctttctactatatctttcagcattagagatttttctgttcttgaaaatacagtctgtgctctttgatttttgctattgtacggtttcatgcatttttttaaagggcatttgaggggaggattattgctatgaatgaaaaaaatattttagcttagactaagctacctgccttcaaaatagtttagggaccaccaccatattttattttgtttttatttttgaacatttttctaatgatttggagagaaaactatttacaaaaattccacatatcagtgatacaatttcttgctgtcaccaattttttataatagcagagtggcctgttctaagaaggccatattttttaagttatctttcagggtaacatggaaatactataaagttggatgtcaaactttaatatgttttcagtgttctctaattttttggaatttttgtagactttacacctggaaaaaaagatttgtaaaatcaccggaacaattgtgtgctttattttataggtagtggttattagtattacatccccattttaaaaacaaaaacataataatggttacaacacgtggagttttactaacatacatattaaatcaaagtatattcttaaaagtacttgtgaagtaaaatctttcttgtgcattttcaatacttgtaaactggaaatcagaaaatatttactatgaacaggaaaatctgacatatagccctttttgatatgtttattaataatgattcttaatggggctcataataagtttaatatgcacagcatcttagaaaagtttaacctgcaaacacttttaaaacataatgcctacttgatttatatctataaaaagactgacaggtaattatatttggaaaacatttaatgcactaactttaaagaaattgaaaattcaggtggataaatagtcttacaaaagacaatgtgctttatgttatacctatagctttggtcccatctttaattgagaaacatttatctgtataaaacatatttttggataaatatatatatatatatttgtatcgctacagaaaggctctaaaaagcatttgaggaaaatatttggttcccttttctataatcatcctttaagattcttatagctacatttggtttattcatcatatttacagtatatatattgttcttttcagtgttcacatcttgttccccatttctcacttgtgtcaccagctgtttgtgccatttttagtgtaaaagttgcagacctattagatctgcagtttaagttgccatgctgctaggaaattgtcctttttctttctagctgttaacctacttcctggaaaaagtagtagctctctgtagcattatggagtttcagtggaaccaaatttttgccattaaaaactggcattatactgaactatacattgagaaatcaatcaaaataaaaatttttactttcacaagttgcaaaaaaaaaaaaaaaa

SEQ ID NO: 30 - DNA, 2619 bp, Human
gaagcaaggaggcggcggcggccgagcgagtggcgagtagtggaaacgttgcttctgaggggagcccaagatgaccggttctaacgagttcaagctgaaccagccacccgaggatggcatctcctccgtgaagttcagccccaacacctcccagttcctgcttgtctcctcctgggacacgtccgtgcgtctctacgatgtgccggccaactccatgcggctcaagtaccagcacaccggcgccgtcctggactgcgccttctacgatccaacgcatgcctggagtggaggactagatcatcaattgaaaatgcatgatttgaacactgatcaagaaaatcttgttgggacccatgatgcccctatcagatgtgttgaatactgtccagaagtgaatgtgatggtcactggaagttgggatcagacagttaaactgtgggatcccagaactccttgtaatgctgggaccttctctcagcctgaaaaggtatataccctctcagtgtctggagaccggctgattgtgggaacagcaggccgcagagtgttggtgtgggacttacggaacatgggttacgtgcagcagcgcagggagtccagcctgaaataccagactcgctgcatacgagcgtttccaaacaagcagggttatgtattaagctctattgaaggccgagtggcagttgagtatttggacccaagccctgaggtacagaagaagaagtatgccttcaaatgtcacagactaaaagaaaataatattgagcagatttacccagtcaatgccatttcttttcacaatatccacaatacatttgccacaggtggttctgatggctttgtaaatatttgggatccatttaacaaaaagcgactgtgccaattccatcggtaccccacgagcatcgcatcacttgccttcagtaatgatgggactacgcttgcaatagcgtcatcatatatgtatgaaatggatgacacagaacatcctgaagatggtatcttcattcgccaagtgacagatgcagaaacaaaacccaagtcaccatgtacttgacaagatttcatttacttaagtgccatgttgatgataataaaacaattcgtactccccaatggtggatttattactattaaagaaaccagggaaaatattaattttaatattataacaacctgaaaataatggaaaagaggtttttgaatttttttttttaaataaacaccttcttaagtgcatgagatggtttgatggtttgctgcattaaaggtatttgggcaaacaaaattggagggcaagtgactgcagttttgagaatcagttttgaccttgatgattttttgtttccactgtggaaataaatgtttgtaaataagtgtaataaaaatccctttgcattctttctggaccttaaatggtagaggaaaaggctcgtgagccatttgtttcttttgctggttatagttgctaattctaaagctgcttcagactgcttcatgaggaggttaatctacaattaaacaatatttcctcttggccgtccattattttctgaagcagatggttcatcatttcctgggctgttaaacaaagcgaggttaaggttagactcttgggaatcagctagttttcaatcttattagggtgcagaaggaaaactaataagaaaacctcctaatatcattttgtgactgtaaacaattatttattagcaaacaattgatcccagaagggcaaattgtttgagtcagtaatgagctgagaaaagacagagcatatctgtgtatttggaaaaataattgtaacgtaattgcagtgcatttagacaggcatctatttggacctgtttctatctctaaatgaatttttggaaacattaatgaggtttacatatttctctgacatttatatagttcttatgtccatttcagttgaccagccgctggtgattaaagttaaaaagaaaaaaattatagtgagaatgagattcatttcaatgtaatgcactaaagcagaacacgaacttagcttggcctattctaggtagttccaaatagtatttttgttgtcaaactttaaaatttatattaatttgcaaatgtatgtctctgagtaggacttggacctttcctgagatttattttatccgtgatgtattttttttaattcttttgatacagagaagggtctttttttttttaagtatttcagtgaaaacttggtgtaagtctgaacccatcttttgaaatgtattttcttcattgcaggtccacctaatcatcctgtgaaagtggtttctctatggaaagctttgtttgcttcctacaaatacatgcttattccttaagggatgtgttagagttactgtggatttctctgttttctgtcttacaagaaacttgtctatgtaccttaatactttgtttaggatgaggagtctttgtgtccctgtacagtagtctgacgtatttccccttctgtcccctagtaagcccagttgctgtatctgaacagtttgagctctttttgtaatatactctaaacctgttatttctgtgctaataaacgagatgcagaacccttgaaaaaaaaaaaaaaaaaaaaaaaaaaaaaaaaaa

SEQ ID NO: 31 - protein, 328 aa, Human
MTGSNEFKLNQPPEDGISSVKFSPNTSQFLLVSSWDTSVRLYDVPANSMRLKYQHTGAVLDCAFYDPTHAWSGGLDHQLKMHDLNTDQENLVGTHDAPIRCVEYCPEVNVMVTGSWDQTVKLWDPRTPCNAGTFSQPEKVYTLSVSGDRLIVGTAGRRVLVWDLRNMGYVQQRRESSLKYQTRCIRAFPNKQGYVLSSIEGRVAVEYLDPSPEVQKKKYAFKCHRLKENNIEQIYPVNAISFHNIHNTFATGGSDGFVNIWDPFNKKRLCQFHRYPTSIASLAFSNDGTTLAIASSYMYEMDDTEHPEDGIFIRQVTDAETKPKSPCT

SEQ ID NO: 32 - DNA, 2690 bp, Human
ggcacgagcaccatcgctgctggagcagctgccttcaggccctgcgccgcctccggagtccatggccggcacgcgctgggtactcggggcgctgctccggggctgcggctgtaactgcagcagctgccggcgcaccggcgccgcctgcctgcccttctactccgccgcgtcctaccctgccctccgtgcctctctgctgccgcagtcgctggcggcggcggccgccgtcccgacgcgcagctacagccaggagtccaaaactacttacctggaagaccttccaccaccccctgagtatgaattggccccgtccaagttagaagaggaagtggatgatgtctttctcattcgagctcaaggactgccctggtcatgcactatggaagatgtgcttaactttttttcagactgcagaatccgcaacggtgagaatggaatacattttctcctaaacagagatgggaaacgaaggggtgatgccttaattgaaatggagtcagagcaggatgtgcagaaagccttagagaagcaccgcatgtacatgggccagcggtatgtggaagtatatgagataaacaatgaagatgtggatgccttaatgaagagcttgcaggtcaaatcttcgcctgtggtaaatgatggtgtggttcgtttgagaggacttccttatagttgcaatgagaaagacattgtagacttctttgcaggactgaatatagttgacattacttttgtgatggactatagagggaggcgaaaaacaggggaagcctatgtgcaatttgaagaaccagaaatggccaaccaagccctgttgaaacacagggaagaaattggtaatcgatacatcgagatatttccaagcagaaggaatgaagttcgaacacatgtcggttcttataagggaaagaaaatcgcatcttttcctactgctaagtatataactgagccagaaatggtctttgaagaacatgaagtaaatgaggtatttcaacccatgacagcttttgaaagtgagaaggaaatagaattgcctaaggaggtgccagaaaagcttccagaggctgctgattttggaactacgtcttctctgcattttgtccacatgagaggattacctttccaagccaatgcccaagacattataaacttttttgctccactcaagcctgttagaatcaccatggaatacagctccagtgggaaggccactggagaagctgatgtgcactttgagacccatgaggatgctgttgcagcgatgctcaaggatcggtcccacgttcatcataggtatattgaactgttcctgaattcatgtccaaaaggaaaataagactctaggggctccagataataagggtgaagcaagaagcatttcatttgcacatctttcttggacttgggatatacagttccagtttattagcagcaactgctagggaaatgattttggtgttttgggttaattgcttctaagaaaagtttcatagtggactgtttagaagaagaaatgaaagatccagtttgggattatgaaataaaccacaaattaaaatttttgtttaaactgtccaggatctgatttaaaaatatggtctttgttttatatgattaaatggtttgttttcatagatgatatgttactcattgtaaagaccacatatttttattcagcagtgttctttaaacggtttcatttaaaaagtaactttttttttttgcctgtgaattgagtgctctgatgtaaaacttctcatggagtgaaacagtgatttattttaaccaaacattcaccaaagcaaagaacggtttcagacctttgaactggtatggtttggcagaatagttttaaattttgctgtatttgattacttagagataggaatttttaaaaatcaaaacaaaaaataccacagcttagtgtaaatgacaatttggcggttttatgtctttagaaatgttttgcctttctaagccttgtgctaaaggcgtataacggtggtgcctatctacttaagggggcattctagtcttaacttaaaagttgtctaaactgtccctccctggctttttttggtttggggtagacctaagggtgtttgttagtctcaaaactgtgaagtgacatgtcagaacagtccagactggtaagaaaattaatggcttcacttgaatttaaaccagctctagataggaaaaaaatcagtctcctcatttgctttttaaatggagtagtacatcccatattttagaacaagtaggggtgccttgcttaaataaaaatagcatttaatgtataattgtgtgaagggtttatggataaagctgtacttctgtcacaatgtggcagtactttctgctttaatattaaacagcttgttatttaaatattggacaaaatggctggcttcaaaatatagtcattaataaactaactttatgtgcacctgtgtaggagaatcaaaatcctgtatgctttctttgccttgttcctgttctcagggtgacgactgccaccaggagatgcagttctagttcttaaaattaaatttgcccaggtttctgacaggtgatacctggaagagagactatgtcttctcttacttaatacataaccatctttgattaccagctaagatgcgaaatcactgtactgtagtcaataaatgaagacttgtttcaggctg

SEQ ID NO: 33 - protein, 424 aa, Human
MAGTRWVLGALLRGCGCNCSSCRRTGAACLPFYSAASYPALRASLLPQSLAAAAAVPTRSYSQESKTTYLEDLPPPPEYELAPSKLEEEVDDVFLIRAQGLPWSCTMEDVLNFFSDCRIRNGENGIHFLLNRDGKRRGDALIEMESEQDVQKALEKHRMYMGQRYVEVYEINNEDVDALMKSLQVKSSPVVNDGVVRLRGLPYSCNEKDIVDFFAGLNIVDITFVMDYRGRRKTGEAYVQFEEPEMANQALLKHREEIGNRYIEIFPSRRNEVRTHVGSYKGKKIASFPTAKYITEPEMVFEEHEVNEVFQPMTAFESEKEIELPKEVPEKLPEAADFGTTSSLHFVHMRGLPFQANAQDIINFFAPLKPVRITMEYSSSGKATGEADVHFETHEDAVAAMLKDRSHVHHRYIELFLNSCPKGK

SEQ ID NO: 34 - DNA, 2455 bp, Human
gaattcgggcgggcttcttcgctgccgacgtacgacgagtggccgggctcttgcgtctggtaacgcgctgtctctaacgccagcgccgtctcgcgcgcactgcgcacagaccacccgcagacgcccggcagtccgcaggcccaaacgcgcacgcgaccccgctctccgcaccgtacccggccgcctcggcatggcgccccgcagcgcccggcgacccctgctgctgctactgcctgttgctgctgctcggcctcatgcattgtcgtcagcagccatgtttatggtgaaaaatggcaacgggaccgcgtgcataatggccaacttctctgctgccttctcagtgaactacgacaccaagagtggccccaagaacatgacctttgacctgccatcagatgccacagtggtgctcaaccgcagctcctgtggaaaagagaacacttctgaccccagtctcgtgattgcttttggaagaggacatacactcactctcaatttcacgagaaatgcaacacgttacagcgttcagctcatgagttttgtttataacttgtcagacacacaccttttccccaatgcgagctccaaagaaatcaagactgtggaatctataactgacatcagggcagatatagataaaaaatacagatgtgttagtggcacccaggtccacatgaacaacgtgaccgtaacgctccatgatgccaccatccaggcgtacctttccaacagcagcttcagcaggggagagacacgctgtgaacaagacaggccttccccaaccacagcgccccctgcgccacccagcccctcgccctcacccgtgcccaagagcccctctgtggacaagtacaacgtgagcggcaccaacgggacctgcctgctggccagcatggggctgcagctgaacctcacctatgagaggaaggacaacacgacggtgacaaggcttctcaacatcaaccccaacaagacctcggccagcgggagctgcggcgcccacctggtgactctggagctgcacagcgagggcaccaccgtcctgctcttccagttcgggatgaatgcaagttctagccggtttttcctacaaggaatccagttgaatacaattcttcctgacgccagagaccctgcctttaaagctgccaacggctccctgcgagcgctgcaggccacagtcggcaattcctacaagtgcaacgcggaggagcacgtccgtgtcacgaaggcgttttcagtcaatatattcaaagtgtgggtccaggctttcaaggtggaaggtggccagtttggctctgtggaggagtgtctgctggacgagaacagcacgctgatccccatcgctgtgggtggtgccctggcggggctggtcctcatcgtcctcatcgcctacctcgtcggcaggaagaggagtcacgcaggctaccagactatctagcctggtgcacgcaggcacagcagctgcaggggcctctgttcctttctctgggcttagggtcctgtcgaaggggaggcacactttctgcaaacgtttctcaaatctgcttcatccaatgtgaagttcatcttgcagcatttactatgcacaacagagtaactatcgaaatgacggtgttaattttgctaactgggttaaatattttgctaactggttaaacattaatatttaccaaagtaggattttgagggtgggggtgctctctctgagggggtgggggtgccgctgtctctgaggggtgggggtgccgctgtctgaggggtgggggtgccgctctctctgagggggtgggggtgccgctttctctgagggggtgggggtgccgctctctctgagggggtgggggtgctgctctctccgaggggtggaatgccgctgtctctgaggggtgggggtgccgctctaaattggctccatatcattgagtttagggttctggtgtttggtttcttcattctttactgcactcagatttaagccttacaaagggaaacctctggccgtcacacgtaggacgcatgaaggtcactcgtgtgaggctgacatgctcacacattacaacagtagagagggaaaatcctaagacagaggaactccagagatgagtgtctggagcggcttcagttcagctttaaaggccaggacgcgcgacacgtggctggcggcctcgttccagtggcggcacgtccttggcgtctctaatgtctgcagctcaagggctggcacttttttaaatataaaaatggtgttatttttatttttttttgtaaagtgatttttggtcttctgttgacattcgggtgatcctgttctgcgctgtgtacaatgtgagatcggtgcgttctcctgatgttttgccgtggcttggggattgtacacgggaccagctcacgtaatgcattgcctgtaacaatgtaataaaaagcctctttctttcaaaaaaaccccgaattc

SEQ ID NO: 35 - protein, 416 aa, Human
MAPRSARRPLLLLLPVAAARPHALSSAAMFMVKNGNGTACIMANFSAAFSVNYDTKSGPKNMTFDLPSDATVVLNRSSCGKENTSDPSLVIAFGRGHTLTLNFTRNATRYSVQLMSFVYNLSDTHLFPNASSKEIKTVESITDIRADIDKKYRCVSGTQVHMNNVTVTLHDATIQAYLSNSSFSRGETRCEQDRPSPTTAPPAPPSPSPSPVPKSPSVDKYNVSGTNGTCLLASMGLQLNLTYERKDNTTVTRLLNINPNKTSASGSCGAHLVTLELHSEGTTVLLFQFGMNASSSRFFLQGIQLNTILPDARDPAFKAANGSLRALQATVGNSYKCNAEEHVRVTKAFSVNIFKVWVQAFKVEGGQFGSVEECLLDENSTLIPIAVGGALAGLVLIVLIAYLVGRKRSHAGYQTI

SEQ ID NO: 36 - DNA, 1545 bp, Human
gaattcggcacgaggccgaagttggaagtgtctcttagcagcgcgcggagaagaacggggagccagcatcatggcagaacaggatgtggaaaacgatcttttggattacgatgaagaggaagagccccaggctcctcaagagagcacaccagctccccctaagaaagacatcaagggatcctacgtttccatccacagctctggcttccgggactttctgctgaagccggagctcctgcgggccatcgtggactgtggctttgagcatccttctgaggtccagcatgagtgcattccccaggccatcctgggcatggacgtcctgtgccaggccaagtccgggatgggcaagacagcggtcttcgtgctggccaccctacagcagattgagcctgtcaacggacaggtgacggtcctggtcatgtgccacacgagggagctggccttccagatcagcaaggaatatgagcgcttttccaagtacatgcccagcgtcaaggtgtctgtgttcttcggtggtctctccatcaagaaggatgaagaagtgttgaagaagaactgtccccatgtcgtggtggggaccccgggccgcatcctggcgctcgtgcggaataggagcttcagcctaaagaatgtgaagcactttgtgctggacgagtgtgacaagatgctggagcagctggacatgcggcgggatgtgcaggagatcttccgcctgacaccacacgagaagcagtgcatgatgttcagcgccaccctgagcaaggacatccggcctgtgtgcaggaagttcatgcaggatcccatggaggtgtttgtggacgacgagaccaagctcacgctgcacggcctgcagcagtactacgtcaaactcaaagacagtgagaagaaccgcaagctctttgatctcttggatgtgctggagtttaaccaggtgataatcttcgtcaagtcagtgcagcgctgcatggccctggcccagctcctcgtggagcagaacttcccggccatcgccatccaccggggcatggcccaggaggagcgcctgtcacgctatcagcagttcaaggatttccagcggcggatcctggtggccaccaatctgtttggccgggggatggacatcgagcgagtcaacatcgtctttaactacgacatgcctgaggactcggacacctacctgcaccgggtggcccgggcgggtcgctttggcaccaaaggcctagccatcacttttgtgtctgacgagaatgatgccaaaatcctcaatgacgtccaggaccggtttgaagttaatgtggcagaacttccagaggaaatcgacatctccacatacatcgagcagagccggtaaccaccacgtgccagagccgcccacccggagccgcccgcatgcagcttcacctcccctttccaggcgccactgttgagaagctagagattgtatgagaataaacttgttattatggaagcctgaaaaaaaaaaaaaaaaaaaaaaaaaaaaaaaaaaaaaaaaaaaaaaaaaaaaaaaaaaaaaaactcgac

SEQ ID NO: 37 - protein, 427 aa, Human
MAEQDVENDLLDYDEEEEPQAPQESTPAPPKKDIKGSYVSIHSSGFRDFLLKPELLRAIVDCGFEHPSEVQHECIPQAILGMDVLCQAKSGMGKTAVFVLATLQQIEPVNGQVTVLVMCHTRELAFQISKEYERFSKYMPSVKVSVFFGGLSIKKDEEVLKKNCPHVVVGTPGRILALVRNRSFSLKNVKHFVLDECDKMLEQLDMRRDVQEIFRLTPHEKQCMMFSATLSKDIRPVCRKFMQDPMEVFVDDETKLTLHGLQQYYVKLKDSEKNRKLFDLLDVLEFNQVIIFVKSVQRCMALAQLLVEQNFPAIAIHRGMAQEERLSRYQQFKDFQRRILVATNLFGRGMDIERVNIVFNYDMPEDSDTYLHRVARAGRFGTKGLAITFVSDENDAKILNDVQDRFEVNVAELPEEIDISTYIEQSR

SEQ ID NO: 38 - DNA, 2140 bp, Human
gtggcgcgcacgcgcagctccgcttccgggagccgctcctcgctacccactatgctctgcgacatcgacctgtcgcaaaggccgcgtttgcggggccaatgagcgactcgctttccgtgcggtgcggcgagtgaggccccggtcttcctcctcgtcctgccgcaggccagaacccctgacggtattcagctgcgcgtaagtctggccggtgccatctgtctccgcaatgccccccaagaaacaggctcaggccgggggcagcaaaaaggcggacgaaaaaaagaaggagaagattatcgaagacaaaactttcggtttgaagaataagaaaggagcaaagcaacagaagtttatcaaggctgtcacacatcaagttaaatttggtcaacaaaatccacgtcaggtagcacagagtgaagctgaaaagaaattgaagaaggatgacaagaagaaagatttgcaggagctaaatgagctgttcaaacctgtagttgctgctcaaaaaataagtaaaggtgcagatcccaagtctgtagtatgtgcattcttcaagcaaggacagtgtactaaaggagataagtgtaagttctcccatgacttgactctggagagaaaatgtgaaaagcgaagtgtttacattgatgcaagagatgaagaacttgaaaaagatactatggataattgggatgagaaaaagctggaagaagtagtgaacaagaagcacggtgaggcggaaaagaaaaaaccaaaaactcaaatagtgtgcaagcatttcctggaagctattgaaaacaacaagtatggctggttttgggtatgccctggagggggtgatatttgcatgtatcgtcatgcacttcctcctggatttgtgttgaaaaaagataaaaagaaagaagagaaagaagatgaaatttcattagaagatctaattgagagagagcgttctgccctaggtccaaatgttaccaaaatcactctagaatcttttcttgcctggaagaaaaggaaaagacaagaaaagattgataaacttgaacaagatatggaaagaaggaaagctgacttcaaagcagggaaagcactagtgatcagtggtcgtgaagtgtttgaatttcgtcctgaactggtcaatgatgatgatgaggaagcagatgatacccgctacacccagggaacaggtggtgatgaggttgatgattcagtgagtgtaaatgacatagatttaagcctgtacatcccaagagatgtagatgaaacaggtattactgtagccagtcttgaaagattcagcacatatacttcagataaagatgaaaacaaattaagtgaagcttctggaggtagggctgaaaatggtgaaagaagtgacttggaagaggacaacgagagggagggaaccggaaaatggagccattgatgctgttcctgttgatgaaaatcttttccactggagaggatttggatgaactagaagaagaattaaataccttgatttagaagaatgccccaaccctcgctgaaaaaattaagtcagccagcacgagttgaaattgactacattaatttcctttccacctagaatcaacaggatgtttatttcctatgctgattctggaggagttacctcctgcaaaaaaggcatcttgtccctacatcttctcttctgactttggctacatctcatagtaagttcagagtagttcatgataaattgaaaatataatggtcattgcagaaaatgattgatgttgtactgtccacccaagtaagaagtgtatctgcctttccatcttttggttttcatttgggcatgtgctattaccagaaacaacaaacttatatttaaaatacccttcatttgacacagtttttaatgagtgatttaatttcctctgtatttgtatgtttagaagactgcctaaaacatgagcactgtacttcataaaggaaactgcgtatgcagattcagtattgtgtatctttggacaattagatggacatttaaaatggaacttcttttatctgacaggatcagctacaatgccctgtgttaaattgtttaaaagtttcccttttcttttttgccaataaagttgtaaataaagaccatcatacattaaaaaaaaaaaaaaaaaaa

SEQ ID NO: 39 - protein, 397 aa, Human
MPPKKQAQAGGSKKADEKKKEKIIEDKTFGLKNKKGAKQQKFIKAVTHQVKFGQQNPRQVAQSEAEKKLKKDDKKKDLQELNELFKPVVAAQKISKGADPKSVVCAFFKQGQCTKGDKCKFSHDLTLERKCEKRSVYIDARDEELEKDTMDNWDEKKLEEVVNKKHGEAEKKKPKTQIVCKHFLEAIENNKYGWFWVCPGGGDICMYRHALPPGFVLKKDKKKEEKEDEISLEDLIERERSALGPNVTKITLESFLAWKKRKRQEKIDKLEQDMERRKADFKAGKALVISGREVFEFRPELVNDDDEEADDTRYTQGTGGDEVDDSVSVNDIDLSLYIPRDVDETGITVASLERFSTYTSDKDENKLSEASGGRAENGERSDLEEDNEREGTGKWSH

SEQ ID NO: 40 - DNA, 5434 bp, Human
cgtccgcgtggggggggtgtgtgcccgccttgcgcatgcgtgttccctgggcatggccggctccgttccatccttctgcacagggtatcgcctctctccgtttggtacatcccctcctcccccacgcccggactggggtggtagacgcgcctccgctcatcgcccctccccatcggtttccgcgcgaaaagccggggcgcctgcgctgccgccgccgcgtctgctgaagcctccgagatgccggcgcgtaccgccccagcccgggtgcccacactggccgtcccggccatctcgctgcccgacgatgtccgcaggcggctcaaagatttggaaagagacagcttaacagaaaaggaatgtgtgaaggagaaattgaatctcttgcacgaatttctgcaaacagaaataaagaatcagttatgtgacttggaaaccaaattacgtaaagaagaattatccgaggagggctacctggctaaagtcaaatcccttttaaataaagatttgtccttggagaacggtgctcatgcttacaaccgggaagtgaatggacgtctagaaaacgggaaccaagcaagaagtgaagcccgtagagtgggaatggcagatgccaacagcccccccaaacccctttccaaacctcgcacgcccaggaggagcaagtccgatggagaggctaagcctgaaccttcacctagccccaggattacaaggaaaagcaccaggcaaaccaccatcacatctcattttgcaaagggccctgccaaacggaaacctcaggaagagtctgaaagagccaaatcggatgagtccatcaaggaagaagacaaagaccaggatgagaagagacgtagagttacatccagagaacgagttgctagaccgcttcctgcagaagaacctgaaagagcaaaatcaggaacgcgcactgaaaaggaagaagaaagagatgaaaaagaagaaaagagactccgaagtcaaaccaaagaaccaacacccaaacagaaactgaaggaggagccggacagagaagccagggcaggcgtgcaggctgacgaggacgaagatggagacgagaaagatgagaagaagcacagaagtcaacccaaagatctagctgccaaacggaggcccgaagaaaaagaacctgaaaaagtaaatccacagatttctgatgaaaaagacgaggatgaaaaggaggagaagagacgcaaaacgacccccaaagaaccaacggagaaaaaaatggctcgcgccaaaacagtcatgaactccaagacccaccctcccaagtgcattcagtgcgggcagtacctggacgaccctgacctcaaatatgggcagcacccaccagacgcggtggatgagccacagatgctgacaaatgagaagctgtccatctttgatgccaacgagtctggctttgagagttatgaggcgcttccccagcacaaactgacctgcttcagtgtgtactgtaagcacggtcacctgtgtcccatcgacaccggcctcatcgagaagaatatcgaactcttcttttctggttcagcaaaaccaatctatgatgatgacccgtctcttgaaggtggtgttaatggcaaaaatcttggccccataaatgaatggtggatcactggctttgatggaggtgaaaaggccctcatcggcttcagcacctcatttgccgaatacattctgatggatcccagtcccgagtatgcgcccatatttgggctgatgcaggagaagatctacatcagcaagattgtggtggagttcctgcagagcaattccgactcgacctatgaggacctgatcaacaagatcgagaccacggttcctccttctggcctcaacttgaaccgcttcacagaggactccctcctgcgacacgcgcagtttgtggtggagcaggtggagagttatgacgaggccggggacagtgatgagcagcccatcttcctgacgccctgcatgcgggacctgatcaagctggctggggtcacgctgggacagaggcgagcccaggcgaggcggcagaccatcaggcattctaccagggagaaggacaggggacccacgaaagccaccaccaccaagctggtctaccagatcttcgatactttcttcgcagagcaaattgaaaaggatgacagagaagacaaggagaacgcctttaagcgccggcgatgtggcgtctgtgaggtgtgtcagcagcctgagtgtgggaaatgtaaagcctgcaaggacatggttaaatttggtggcagtggacggagcaagcaggcttgccaagagcggaggtgtcccaatatggccatgaaggaggcagatgacgatgaggaagtcgatgataacatcccagagatgccgtcacccaaaaaaatgcaccaggggaagaagaagaaacagaacaagaatcgcatctcttgggtcggagaagccgtcaagactgatgggaagaagagttactataagaaggtgtgcattgatgcggaaaccctggaagtgggggactgtgtctctgttattccagatgattcctcaaaaccgctgtatctagcaagggtcacggcgctgtgggaggacagcagcaacgggcagatgtttcacgcccactggttctgcgctgggacagacacagtcctcggggccacgtcggaccctctggagctgttcttggtggatgaatgtgaggacatgcagctttcatatatccacagcaaagtgaaagtcatctacaaagccccctccgaaaactgggccatggagggaggcatggatcccgagtccctgctggagggggacgacgggaagacctacttctaccagctgtggtatgatcaagactacgcgagattcgagtcccctccaaaaacccagccaacagaggacaacaagttcaaattctgtgtgagctgtgcccgtctggctgagatgaggcaaaaagaaatccccagggtcctggagcagctcgaggacctggatagccgggtcctctactactcagccaccaagaacggcatcctgtaccgagttggtgatggtgtgtacctgccccctgaggccttcacgttcaacatcaagctgtccagtcccgtgaaacgcccacggaaggagcccgtggatgaggacctgtacccagagcactaccggaaatactccgactacatcaaaggcagcaacctggatgcccctgagccctaccgaattggccggatcaaagagatcttctgtcccaagaagagcaacggcaggcccaatgagactgacatcaaaatccgggtcaacaagttctacaggcctgagaacacccacaagtccactccagcgagctaccacgcagacatcaacctgctctactggagcgacgaggaggccgtggtggacttcaaggctgtgcagggccgctgcaccgtggagtatggggaggacctgcccgagtgcgtccaggtgtactccatgggcggccccaaccgcttctacttcctcgaggcctataatgcaaagagcaaaagctttgaagatcctcccaaccatgcccgtagccctggaaacaaagggaagggcaagggaaaagggaagggcaagcccaagtcccaagcctgtgagccgagcgagccagagatagagatcaagctgcccaagctgcggaccctggatgtgttttctggctgcggggggttgtcggagggattccaccaagcaggcatctctgacacgctgtgggccatcgagatgtgggaccctgcggcccaggcgttccggctgaacaaccccggctccacagtgttcacagaggactgcaacatcctgctgaagctggtcatggctggggagaccaccaactcccgcggccagcggctgccccagaagggagacgtggagatgctgtgcggcgggccgccctgccagggcttcagcggcatgaaccgcttcaattcgcgcacctactccaagttcaaaaactctctggtggtttccttcctcagctactgcgactactaccggccccggttcttcctcctggagaatgtcaggaactttgtctccttcaagcgctccatggtcctgaagctcaccctccgctgcctggtccgcatgggctatcagtgcaccttcggcgtgctgcaggccggtcagtacggcgtggcccagactaggaggcgggccatcatcctggccgcggcccctggagagaagctccctctgttcccggagccactgcacgtgtttgctccccgggcctgccagctgagcgtggtggtggatgacaagaagtttgtgagcaacataaccaggttgagctcgggtcctttccggaccatcacggtgcgagacacgatgtccgacctgccggaggtgcggaatggagcctcggcactggagatctcctacaacggggagcctcagtcctggttccagaggcagctccggggcgcacagtaccagcccatcctcagggaccacatctgtaaggacatgagtgcattggtggctgcccgcatgcggcacatccccttggccccagggtcagactggcgcgatctgcccaacatcgaggtgcggctctcagacggcaccatggccaggaagctgcggtatacccaccatgacaggaagaacggccgcagcagctctggggccctccgtggggtctgctcctgcgtggaagccggcaaagcctgcgaccccgcagccaggcagttcaacaccctcatcccctggtgcctgccccacaccgggaaccggcacaaccactgggctggcctctatggaaggctcgagtgggacggcttcttcagcacaaccgtcaccaaccccgagcccatgggcaagcagggccgcgtgctccacccagagcagcaccgtgtggtgagcgtgcgggagtgtgcccgctcccagggcttccctgacacctaccggctcttcggcaacatcctggacaagcaccggcaggtgggcaatgccgtgccaccgcccctggccaaagccattggcttggagatcaagctttgtatgttggccaaagcccgagagagtgcctcagctaaaataaaggaggaggaagctgctaaggactagttctgccctcccgtcacccctgtttctggcaccaggaatccccaacatgcactgatgttgtgtttttaacatgtcaatctgtccgttcacatgtgtggtacatggtgtttgtggccttggctgacatgaagctgttgtgtgaggttcgcttatcaactaatgatttagtgatcaaattgtgcagtactttgtgcattctggattttaaaagttttttattatgcattatatcaaatctaccactgtatgagtggaaattaagactttatgtagtttttatatgttgtaatatttcttcaaataaatctctcctataaaccaaaaaaaaaaaaaaaaaaaaaaaaaa

SEQ ID NO: 41 - protein, 1616 aa, Human
MPARTAPARVPTLAVPAISLPDDVRRRLKDLERDSLTEKECVKEKLNLLHEFLQTEIKNQLCDLETKLRKEELSEEGYLAKVKSLLNKDLSLENGAHAYNREVNGRLENGNQARSEARRVGMADANSPPKPLSKPRTPRRSKSDGEAKPEPSPSPRITRKSTRQTTITSHFAKGPAKRKPQEESERAKSDESIKEEDKDQDEKRRRVTSRERVARPLPAEEPERAKSGTRTEKEEERDEKEEKRLRSQTKEPTPKQKLKEEPDREARAGVQADEDEDGDEKDEKKHRSQPKDLAAKRRPEEKEPEKVNPQISDEKDEDEKEEKRRKTTPKEPTEKKMARAKTVMNSKTHPPKCIQCGQYLDDPDLKYGQHPPDAVDEPQMLTNEKLSIFDANESGFESYEALPQHKLTCFSVYCKHGHLCPIDTGLIEKNIELFFSGSAKPIYDDDPSLEGGVNGKNLGPINEWWITGFDGGEKALIGFSTSFAEYILMDPSPEYAPIFGLMQEKIYISKIVVEFLQSNSDSTYEDLINKIETTVPPSGLNLNRFTEDSLLRHAQFVVEQVESYDEAGDSDEQPIFLTPCMRDLIKLAGVTLGQRRAQARRQTIRHSTREKDRGPTKATTTKLVYQIFDTFFAEQIEKDDREDKENAFKRRRCGVCEVCQQPECGKCKACKDMVKFGGSGRSKQACQERRCPNMAMKEADDDEEVDDNIPEMPSPKKMHQGKKKKQNKNRISWVGEAVKTDGKKSYYKKVCIDAETLEVGDCVSVIPDDSSKPLYLARVTALWEDSSNGQMFHAHWFCAGTDTVLGATSDPLELFLVDECEDMQLSYIHSKVKVIYKAPSENWAMEGGMDPESLLEGDDGKTYFYQLWYDQDYARFESPPKTQPTEDNKFKFCVSCARLAEMRQKEIPRVLEQLEDLDSRVLYYSATKNGILYRVGDGVYLPPEAFTFNIKLSSPVKRPRKEPVDEDLYPEHYRKYSDYIKGSNLDAPEPYRIGRIKEIFCPKKSNGRPNETDIKIRVNKFYRPENTHKSTPASYHADINLLYWSDEEAVVDFKAVQGRCTVEYGEDLPECVQVYSMGGPNRFYFLEAYNAKSKSFEDPPNHARSPGNKGKGKGKGKGKPKSQACEPSEPEIEIKLPKLRTLDVFSGCGGLSEGFHQAGISDTLWAIEMWDPAAQAFRLNNPGSTVFTEDCNILLKLVMAGETTNSRGQRLPQKGDVEMLCGGPPCQGFSGMNRFNSRTYSKFKNSLVVSFLSYCDYYRPRFFLLENVRNFVSFKRSMVLKLTLRCLVRMGYQCTFGVLQAGQYGVAQTRRRAIILAAAPGEKLPLFPEPLHVFAPRACQLSVVVDDKKFVSNITRLSSGPFRTITVRDTMSDLPEVRNGASALEISYNGEPQSWFQRQLRGAQYQPILRDHICKDMSALVAARMRHIPLAPGSDWRDLPNIEVRLSDGTMARKLRYTHHDRKNGRSSSGALRGVCSCVEAGKACDPAARQFNTLIPWCLPHTGNRHNHWAGLYGRLEWDGFFSTTVTNPEPMGKQGRVLHPEQHRVVSVRECARSQGFPDTYRLFGNILDKHRQVGNAVPPPLAKAIGLEIKLCMLAKARESASAKIKEEEAAKD

SEQ ID NO: 42 - DNA, 2956 bp, Human
aggtcgggtgagtgtagtgtgcagggaagagacgcgtcagcgccagggccaggcccgcccgggggcagcccggcagccgaatcttgggctactctgtcccaacagccggagcagatcagaccgaccggccctgcccgctcggtcccgcgccctccagaccctacggtctccgtttctaggggcacatggttagcggcaggcgcccacagccaatccactttgccagcctgccccttcctctgccaagagcagcttcttcagccgcgctccagttccgcagacgcctgccccaccctgctcttcccttccagggaagacggatcacgcggccaagaacgagactcgcaaactgggcatttctccgagccgggctagagcaagtagcgagactccgcgtgagagtgggaaagagccttaacaggcaaccatgttgcccagtgggttttctgtgcctttgggtgcggaccaatgaggcgcgtggggcgggacttccgcttcgcctaggtgttgtcgtccctgctagtactccgggctgtgggggtcggtgcggatattcagtcatgaaatcagggtagggacttctcccgcagcgacgcggctggcaagactgtttgtgttgcgggggccggacttcaagagagaaagagagagtgggcagacatcgaagccaaacagcagtatcccggaagcactcatgcaactttggtggcggccactcagttttctctgccagtgtctggtgattttacaacgagatgctgctctccatagggatgctcatgctgtcagccacacaagtctacaccatcttgactgtccagctctttgcattcttaaacctactgcctgtagaagcagacattttagcatataactttgaaaatgcatctcagacatttgatgacctccctgcaagatttggttatagacttccagctgaaggtttaaagggttttttgattaactcaaaaccagagaatgcctgtgaacccatagtgcctccaccagtaaaagacaattcatctggcactttcatcgtgttaattagaagacttgattgtaattttgatataaaggttttaaatgcacagagagcaggatacaaggcagccatagttcacaatgttgattctgatgacctcattagcatgggatccaacgacattgaggtactaaagaaaattgacattccatctgtctttattggtgaatcatcagctaattctctgaaagatgaattcacatatgaaaaagggggccaccttatcttagttccagaatttagtcttcctttggaatactacctaattcccttccttatcatagtgggcatctgtctcatcttgatagtcattttcatgatcacaaaatttgtccaggatagacatagagctagaagaaacagacttcgtaaagatcaacttaagaaacttcctgtacataaattcaagaaaggagatgagtatgatgtatgtgccatttgtttggatgagtatgaagatggagacaaactcagaatccttccctgttcccatgcttatcattgcaagtgtgtagacccttggctaactaaaaccaaaaaaacctgtccagtgtgcaagcaaaaagttgttccttctcaaggcgattcagactctgacacagacagtagtcaagaagaaaatgaagtgacagaacatacccctttactgagacctttagcttctgtcagtgcccagtcatttggggctttatcggaatcccgctcacatcagaacatgacagaatcttcagactatgaggaagacgacaatgaagatactgacagtagtgatgcagaaaatgaaattaatgaacatgatgtcgtggtccagttgcagcctaatggtgaacgggattacaacatagcaaatactgtttgactttcagaagatgattggtttatttccctttaaaatgattaggtatatactgtaatttgattttttgctcccttcaaagatttctgtagaaataacttattttttagtattctacagtttaatcaaattactgaaacaggacttttgatctggtatttatctgccaagaatatacttcattcactaataatagactggtgctgtaactcaagcatcaattcagctcttcttttggaatgaaagtatagccaaaacataaaaaaaaaaaaatcctcagtatagcttgcaattaagacctagatcacagtatttaagtgttttgcgttttatacatgaggtcagtgctacagccacctagcatgaactaacccagcttccacctccataaagttacctagagttgttgagttggaatatgttctggcatttacctgacctgccaatcattagggagaggcaacaaggtaattcagcctttcctcctatcagcacaaagaaactcaaagctgttttttccctttctgttccaaagcagtcttatcctgacaggagcggtctatactagtgcagatttcaacacttttttttaacgttttaattactatagtgttatgtagagatttgattgagcagctaatgtttctgaactttacttactaattttcagtgtccttaagggttctgtagtgttatcaaagcaaaaagaaaatgctgcataaaaataccaaacttcagcaactgttaatactcagatcatatacctcttaataaatagcatcttatgctaattagccctgctaaactatgtacagaggaaactgttcaagtattggatttgaaagtaagtgacttatgtttaacagaactaatgatgtattgaaacactgtattatgaaaagctaaattatacatcattgtaactatgtagaaagtgtagactaatgtataatcaaaatgctaaggatttttatatggccttgtatgaggggagtttgaatgttaataaacatgttttccactttaagatccagtaaaaaaaaaaaaaaaaaaaaaaa

SEQ ID NO: 43 - DNA, 1221 bp, Human
cgcaggctggaaggaagacgaacctacgaagcagagatctgaagacagcatgtacacagccattccccagagtggctctccattcccaggctcagtgcaggatccaggcctgcatgtgtggcgggtggagaagctgaagccggtgcctgtggcgcaagagaaccagggcgtcttcttctcgggggactcctacctagtgctgcacaatggcccagaagaggtttcccatctgcacctgtggataggccagcagtcatcccgggatgagcagggggcctgtgccgtgctggctgtgcacctcaacacgctgctgggagagcggcctgtgcagcaccgcgaggtgcagggcaatgagtctgacctcttcatgagctacttcccacggggcctcaagtaccaggaaggtggtgtggagtcagcatttcacaagacctccacaggagccccagctgccatcaagaaactctaccaggtgaaggggaagaagaacatccgtgccaccgagcgggcactgaactgggacagcttcaacactggggactgcttcatcctggacctgggccagaacatcttcgcctggtgtggtggaaagtccaacatcctggaacgcaacaaggcgagggacctggccctggccatccgggacagtgagcgacagggcaaggcccaggtggagattgtcactgatggggaggagcctgctgagatgatccaggtcctgggccccaagcctgctctgaaggagggcaaccctgaggaagacctcacagctgacaaggcaaatgcccaggccgcagctctgtataaggtctctgatgccactggacagatgaacctgaccaaggtggctgactccagcccctttgcccttgaactgctgatatctgatgactgctttgtgctggacaacgggctctgtggcaagatctatatctggaaggggcgaaaagcgaatgagaaggagcggcaggcagccctgcaggtggccgagggcttcatctcgcgcatgcagtacgccccgaacactcaggtggagattctgcctcagggccgtgagagtcccatcttcaagcaatttttcaaggactggaaatgagggtgggcgtcttcctgccccatgctcccctgccccccaccacctgcctgcttgcttctctggctgcctggtcagtgcagaggtgccccctgcagatgttcaataaaggagacaagtgctttccc

SEQ ID NO: 44 - protein, 348 aa, Human
MYTAIPQSGSPFPGSVQDPGLHVWRVEKLKPVPVAQENQGVFFSGDSYLVLHNGPEEVSHLHLWIGQQSSRDEQGACAVLAVHLNTLLGERPVQHREVQGNESDLFMSYFPRGLKYQEGGVESAFHKTSTGAPAAIKKLYQVKGKKNIRATERALNWDSFNTGDCFILDLGQNIFAWCGGKSNILERNKARDLALAIRDSERQGKAQVEIVTDGEEPAEMIQVLGPKPALKEGNPEEDLTADKANAQAAALYKVSDATGQMNLTKVADSSPFALELLISDDCFVLDNGLCGKIYIWKGRKANEKERQAALQVAEGFISRMQYAPNTQVEILPQGRESPIFKQFFKDWK

SEQ ID NO: 45 - DNA, 5886 bp, Human
gtgaggagggccggcggcggggcggacccctggcggtcctcctggctggggtccgcgcgctcgcggcagctccccgtggaggtcactgtccgtgccagtccctcccgctgtcccgccctctcccgctgccgccgccgccgccgccgcgcccgcctcagcgcccccactccgcgcttgggagcgaggagccgccagcgcccccgccccgccgccgccgcagcgccctcaggccgccattcgccaccgaaactttccagcgcccgcgctctctccgggactcggcggcggcggggcgggggcggcccgggggcggcgcgcggctgctccggggcgccgggccctcttcggccgccgcacggccgggactcggaggctgccggctggagggaggttcggagcgcggccgggcgcgcggcgccgccacaagttgcgctgctcgcgacgagatttccgtgagggtggaagaaaatcataccatatcagatgcctcgcagagcaccaggcccaccgtgaaaggctggtccctgcagacggcttcccatttttatgaccggatgctgggaagcctgctggtccacaggtccatacatgaagtcaccataaggagccctggcctccttgcagaaacatcgaggtgacatgtagcatgaccgagctcgctggcgcctcttcatcgtgctgccaccgccctgcaggaagaggggccatgcagtcagtcttgcaccactttcaacgtttgcgagggagagagggtggttcccacttcatcaacacctcatcgccgcgaggtgaggctaagatgagcataaccagtgacgaggtgaactttctggtgtatcggtatctccaggagtcaggtttttcccactcggctttcacgtttgggattgagagccacatcagccagtccaacatcaatgggacgctagtgccaccggccgccctcatctccattctccagaagggcctgcagtatgtagaggccgagatcagtatcaacgaggatggcacagtgttcgacggccgccccatagagtccctgtcactgatagacgccgtgatgcccgacgtggtgcagacgcggcagcaggcattccgagagaagctcgctcagcagcaagccagtgcggcggcggcggcggctgcggccacggcagcagcgacagcagccaccacgacctcagccggcgtttcccaccaaaatccatcgaagaacagagaggccacggtgaatggggaagagaacagagcacattcagtcaataatcacgcgaagccaatggaaatagatggagaggttgagattccatccagcaaagccacagtccttcggggccatgagtctgaggtgttcatttgtgcctggaatcctgtcagtgatttgctagcctccggatctggagactcaactgcaaggatatggaacctgaatgagaatagcaacgggggctccacccagctcgtgttgaggcactgtatacgagaggggggccatgacgtcccgagtaacaaagacgtcacctcactggactggaataccaatggaacactcttggctacgggttcatatgacggttttgcaagaatatggacggaagatggtaacctggccagcaccttaggccaacataaaggccccatctttgccttgaaatggaaccgaaaggggaattacattttgagtgctggtgtagacaaaacaacaataatttgggatgcccacacaggagaagccaaacagcagtttccttttcattcagcccctgcccttgatgtggactggcagaacaacacgacctttgcctcctgtagcacagacatgtgtatccatgtgtgcaggctcggctgtgaccgcccagtcaaaaccttccagggacacacaaacgaggtcaacgccatcaaatgggatccgtctggaatgttgctggcatcctgctcggatgacatgacattgaagatctggagcatgaaacaggaggtgtgcatccatgatcttcaggctcacaataaagagatctacaccatcaagtggagccccactgggcccgccaccagcaacccaaactccaacatcatgttggcaagtgcttcgtttgattctacggtgcgactgtgggacatagaacgaggcgtctgcacccacacgctcacgaagcatcaggagcctgtctatagcgtagctttcagccctgatgggaagtacttggccagtggatccttcgacaagtgcgtccatatctggaatactcagagtggaaatcttgtccacagctaccgaggcactggcggcatcttcgaggtgtgctggaacgcccgaggagacaaagtgggtgccagcgcgtccgacggctctgtgtgtgttttggatctgcggaagtaaccacaaaatattatcgaaaaaagaaaagaattctaatgaccagccgtgaatgtgtagggttgcagctctattctccaaaactgtaggaacttgacttgcgttagagtgtactctgaaaccaactcgtctctggccgcaggagtctatatgttttcgtaatcttcatcaagaagtttttaaaaggcaagcaaaaacagaagcaaatcatatcaaacggggatagaatggtttccactgaggacattcagcctgggaaggaggaagtcaccagctcgaggcgtgtggattggtttccacccggaacaggctctgtgatggctgaatggaaagaaacgtaaaaagctgtgccaaaaaaaaagcaaaatgctgtgataaaccaaacagggaagggggaaaaaccctcctccttgggatttttttttttttgttttccctaacaatttggacactacaattgctctcacaaaggaggttcaaagaccagtttgtaccgatgaaacgcgcaactttgtaatcccaacactttctattttctagaatcttctttgttcattgggtggtttttcagtcggctggaattctatcttctgggggccttccgtctgagatggaagctgtcttgggcttgttgtctcttccttctgttgctccctgcccctccccctgtctttccactctgtctggtgagctctgctttttcagtgcaccatcaagagatgcagccccgtggacatgaagacacaatctcccacggacagctttcccccttccgccctctcccaccctctcctccccttgcgctcgcgctcgcgctcgctttctcactggcgtgctctctttctctctctctctccctctgtacctttctcatagttgcttcagatcttaggtctcaagggcactttggcgcgtagtaagtgctttatgtaagaaggcagggcaggggggcctttttacaggagaaaaaaaaatgacttataagagaaagagcctggagtatttttggaaaaaaaaataatatttttatgttaaaacaattttaaaatcttaaaatggccatcagacatagagagctttgtgtgattcatgttttaaaaagaaccgaagaagccacaggcagggcctgagggagcccctggctttcccctcagcctcaggaaaggtggtcaggaaaactctggctggacaagggtcagtcttcggggtcagcagcgagattgctctgcagccagtgagggaggtccccgccatgccggctggaagaagaacctcgcatcttttggtgtgtatgcaccttggcagccagcaggaaagcagcgaagagccgcgcgccctctggcctcaagggagcattggcagaaccataaggtactgcagaagccgtcgaaaccgactgctcggctggattaggcgtgttggctacatctttcccacaaccgtataacgaccgatggtcatttctccaagagcaggcttggcgagtccttgcagagctgacatagaggcgcccgcatgtcacttagtctaacgctgacagaaatgaatgcagaaggaagattttcagtcctgaacgtgaattatagaggtagaacgtcgctaataatttctgccatcttcataatttctttgtctcacagaagactaggagaaagatcttttttaaataatctttttgctgtttttaaaaaattaaacaaggctttgtgttcctagaagagcttcatttcagtgaatctggtgacctccatctgcttgctgtcataacccgacacggacttatttttgtcattagcaagggggaaaaggccaaaggacaagggcctcttctcccattggttttcctgtgggcagaagggctgaggaagatggcccagcccgtgggggctgctgggtcaccagcagcgggtagggtgcaatctggtgtgtgttccagcagtgagacggtgttattgtgaaggtggcattcatctgcggagccaaaacccagccatcggggaagggtcagggcttctgtggaacttggaacgtgccaggaccacctgcaaaagccagggtgcgttgatcattctcagatcattgattggcctccacttgggtatgtgaattattcatgtcccagaagaccaaaaagtgctctggttctgagatgagtattttattcgtgttctgtttccgaaacacttagcaaagaaggtcacagtgatgtggagtcgccgcacccatctttgaagatagccagtgtccctggatgaggtgatgatttcccgtcccaaggactctgtgaagtttagagtacagtttgttggggtccaaaagacaccatctctaccccacccaaataaaaatgcactcatctctgtagaacatctgctgtcaaaggccagcctgtcgttagggcatggcttatgcttgacaaaccagtaacaactgtgggatggcgatggtgggatgtgtcgcaagcaattcactagacaatcttcacatgaatgtcggtagccagggtctctcccgagggatggctttagtcttgatgaatgtgaaccatgtcggaattgttaggtagaaacctgggctgggaggcctcggaccccaggctccatccctggcttccccagcctgcggccgcaagcaaaaccaagcgcgagatgcagctagcacccttcatatccatccccgttctcagcgggacaacaccatggacagccgttttcagagcctccagcatttgcacaccactactcaccctctctgctgctggcatgttggtagagtcatccctgtaatcaagaaatggcctgtggaatgttattgttcaacgttgtttacagctcttaaaacatggtgaggaatgcctaagtcttagtgaccaaacgtgaccttgaaagcagacatagcatgacagaccttcctagagtgtttggtcgggttcacagtgaccgagagtcaggtccagcacacacctgggaaagggatgctgccccaagggggaccaaaagggccggacgttacagggtgaaaccctctgacccctcgcgacaccgtaggacttgacttttgtttagtctttctaagaaatagatcatggagccaagtgaagtgcactttgtcaaatgtaagggtctgctttgttcttgttgcttttctgttttttaaccttttgttccgccatttaaaaaaagaaaaaaaaaaagcttatgtttcttgtcaaatgcagaaatgttccttccgccactcactgaagttttgcattctggcttgtgcagtttttattgtctgtgtcagacgtacagccagacatgttctctattggcatttttccgattctgttcagatgacagcgaccgccttttcattccccccgccacctgtactcaccctcacgctctttgaagaaaaaaaaaaaaaatcaccttgtgtgttgtagctcatttgtttcaagagagaatcaacagatcatattcagtgtcttgaataaattgctctattttgatattaaaaaaaaaaaa

SEQ ID NO: 46 - protein, 577 aa, Human
MTELAGASSSCCHRPAGRGAMQSVLHHFQRLRGREGGSHFINTSSPRGEAKMSITSDEVNFLVYRYLQESGFSHSAFTFGIESHISQSNINGTLVPPAALISILQKGLQYVEAEISINEDGTVFDGRPIESLSLIDAVMPDVVQTRQQAFREKLAQQQASAAAAAAAATAAATAATTTSAGVSHQNPSKNREATVNGEENRAHSVNNHAKPMEIDGEVEIPSSKATVLRGHESEVFICAWNPVSDLLASGSGDSTARIWNLNENSNGGSTQLVLRHCIREGGHDVPSNKDVTSLDWNTNGTLLATGSYDGFARIWTEDGNLASTLGQHKGPIFALKWNRKGNYILSAGVDKTTIIWDAHTGEAKQQFPFHSAPALDVDWQNNTTFASCSTDMCIHVCRLGCDRPVKTFQGHTNEVNAIKWDPSGMLLASCSDDMTLKIWSMKQEVCIHDLQAHNKEIYTIKWSPTGPATSNPNSNIMLASASFDSTVRLWDIERGVCTHTLTKHQEPVYSVAFSPDGKYLASGSFDKCVHIWNTQSGNLVHSYRGTGGIFEVCWNARGDKVGASASDGSVCVLDLRK

SEQ ID NO: 47 - DNA, 2308 bp, Human
aaagcgagcccggcagctcaatgacaaatcggtggaggacggctggggtccggccccgggagggggcggggcgcgtttaagagctgcgggccgggtgcggacggcggaggcggcgggactggtccctgctcttcagtgggtcatctgtgtgtcacagcctcagaagaccagcgagatggctgccaacaagagtaagggccagagctccttggccctccacaaggtgatcatggttggcagcggaggcgttggcaagtcagccctgacgcttcagttcatgaatgtttcaaaatcattggcatatgacaagaaaaagtatacagcaaacaaaaaagtagaaggtattctagagtttgtagaagactatgaacctaccaaagctgacagttatagaaagaaagtggttcttgatggggaagaagttcagatagatattctggacaccgctgggcaagaggactacgcagccattcgagataactactttcggagtggggaagggtttcttcttgtgttctcaatcacagaacatgaatcctttacagcaactgccgaattcagggaacagattctccgtgtgaaggctgaagaagataaaattccactgctcgtcgtgggaaacaagtctgacctagaggagcggaggcaggtgcctgtggaggaggccaggagtaaagccgaagagtggggcgtgcagtacgtggagacgtcagcgaagacccgggccaacgtggacaaggtgttctttgacctaatgagagaaatcagaacaaagaagatgtcagaaaacaaagacaagaatggcaagaaaagcagcaagaacaagaaaagttttaaagaaagatgttgcttactatgagtgtcaaggtgacggatgaagccagctgctcctaaggacacagggctgggttggtaaagagaaggctatggttgacttcttgcttgtgcttcccactctccccgacttcattcactcaaacttctttaaatggggaaaaatatttgtgactctgtggctggcagaagaaataagcccatgcaagtggaagggctgctttgtcaggaggttgtggaatttctttcttctccccttcttccctcccaaaagcttagctatgtataaagtgccacagataggaaacagctgttaattacaaagagaaagaattgtcatagcatcttattttgttcctagttttataacattaccatccttcgttttgaactacagatgttgtagtgggttttggaggagggagtggagtaagatgccctcccacttttatcagtttagtagtagtactgagaaaaatcccttcagctctaagaacactgaaaaatccaccgattttttgggtaagcttcttggcaataccctgtggaactgaaacagctaaaaaaatgaatttgaattgcgccagataggtcaataccaagcttctgattcctcctcacatatgaaaagtgaaagttgtgagttgttttcctcttatttaaacattggcctattataatctgtgttggttatttttctcctgtaagcatcctgatttttctgtaggaacttttctttggcagaccaagtgaagactcaggaatggtgtgcattataaatgacacacattgccacttgtgtagatatttttaagttctttggctaagtcctctcctaactgcctgtcctctggttaggcccctccctctccactagtggtgaatgcatgtgtctgtctgatcagcatcactgcacacggaggtctagtgagcctcttgctaagtgtcacacacactcttcccaaagacgtgatgagttaaagttgtattctgaaatcatgaagccagagcctgtgccagaccttctgctacctctcatagaattgctctgtaattctaaatttaaaattagaagtagagagagataagccatcgcccctttgcctctgagaattggctgctgtttctaatataattattttctaagatagccagatagttagaaaaagattttcattgatgacatatctttaaactttcttgcatcagtattctaaattgagcaaactgaaagattttcatcaggaaaggagcactgtgggaagagcccagtattcacattttttccccatttttcagaagcgacatttcatatataggtgccaaaagtgaatcggggtgcggagagtgggaaccttttgaatttatgattgtcacagagatggtagaaattatgatctgactggaaaacaatcctgtatcccctcccaaagaatcatgggctttttttttgaataaaaaagcagacaaatag

SEQ ID NO: 48 - DNA, 3432 bp, Human
actacttctgcgcctgcgcgaccgtgattccccgctcgcgactccccaccccccagggctccctaaagagggccacgagctgcgaaagggcgggaaaggcagttggagaagaggtaagcggttactcactccatggctgcagcaaggagaggcggcggcggcctcggctgaagaaagaaggtgggagcggagagcgcaggcgtgccgaggtggatgtccgtcttttctctgttgcagaaacccaccttgtcccatccacatcaggacatcccagctggagttcaaccttcatcccttctgtggcagttaggagactgaatcaaggtccagagaaggtggaggaatcctgatactgagcgaaatcttcccaaggctgcagacaccgacggatttgctttgggagccagagtagctgccgccaccagagtccggagccatgagcgggtttaattttggaggcactggggcccctacaggcgggttcacgtttggcactgcaaagacggcaacaaccacacctgctacagggttttctttctccacctctggcactggagggtttaattttggggctcccttccaaccagccacaagtaccccttccaccggcctgttctcacttgccacccagactccggccacacagacgacaggcttcacttttggaacagcgactcttgcttcggggggaactggattttctttggggatcggtgcttcaaagctcaacttgagcaacacagctgccaccccagccatggcaaaccccagcggctttgggctgggcagcagcaacctcactaatgccatatcgagcaccgtcacctccagccagggcacagcacccaccggctttgtgtttggcccctccaccacctctgtggctccagctaccacatctggaggcttctcattcactggtggaagcacggcccaaccctccggtttcaacattggctcagcagggaattcagcccagcccacggcacctgccacgttgcccttcactccggccacgccagcagccaccacagcaggtgccacacagccagctgctcccacacccacagccaccatcaccagtactgggcccagcctctttgcgtcaatagcaactgctccaacctcatctgccaccactggactctccctctgtacccctgtgaccacagcgggcgcccccactgctgggacacagggcttcagcttaaaggcacctggagcagcttccggcacctccacaacaacatccaccgctgccaccgccaccgccaccaccaccagcagcagcagcaccaccggctttgccttgaatttaaaaccactggcgccagccgggatccccagcaatacagcagctgccgtgaccgctccacctggccctggcgcagctgcaggggcggctgccagctccgccatgacctacgcgcagctggagagcctgatcaacaaatggagcctggagctagaggaccaggagcggcacttcctccagcaggccacccaggtcaacgcctgggaccgcacgctgatcgagaatggagaaaagatcaccagcctgcaccgcgaggtggagaaggtgaagctggaccagaagaggctggaccaggagctcgacttcatcctgtcccagcagaaggagctggaagacctgctgagcccactggaggagttggtcaaggagcagagcgggaccatctacctgcagcacgcggatgaggagcgtgagaaaacctacaagctggctgagaacatcgacgcacagctcaagcgcatggcccaggatctcaaggacatcatcgagcacctgaacacgtccggggcccccgccgacaccagtgacccactgcagcagatctgcaagatcctcaatgcgcacatggactcactgcagtggatcgaccagaactcggccctgctgcagaggaaggtggaggaggtgaccaaggtgtgcgagggccggcgcaaggagcaggagcgcagcttccggatcacctttgactgagcgacagcagccctggggcccgcaggtccctagggagttcatgaggggaatgcgccctgttgtctgtagtttggggttgtggcaagatacttgtttgtttctttctttctttcacatgactgcccttgacatgatcgctgtgtgctttgcgtttttccatttaggagggtattctgggccttctgcccaggcagcagcctcatgggtgtggcttctgtggctttcatttgagtatctttggccccttttcacctactgcgaccacccacctcatcctggctcagcctggtgatggagaagtgctgatggtcttggtcccagccagggtcgtgggggcagccactctctccaaagcatagtcataggtgtcatgaaaaaataccaaatgtaagagaacctccaagtcagggcgcagtggctcacccctgtaatctcagcactttgggtggccaaggcgggcagatgacttgaggtcaggagttcgagaccagcctggccaacatggtgaaaccccgtctctactaaaaatacaaaaattagtcaggtgtggtggacgcctgtgatctcaatctcagctactcgggaggctgaggcaggagaatcacttgaacccaggaggtgttgcagtgaaccaagatcacaccactgcactccagcctaggcaacagagactctgtctcaaaaaaaaaaaaaaaaaaaaagaaactcccaggagacagcagcctagttttcgagtgtgagcttgtgcttgtgaaagctaaccatgctaaccaccaaggcaaagcagcacagtgtgaatagaacagagcgggatcaagaatttcacagaagacaggtcagctgaggggcctgcacacacagggtgttgaggaaccacagatgggcgccgagaggcctgccttttgcctggcccaggctcacccccaccttgggcctcacctcctccaggaagccttcccagctacccgaagctcaggtggccttcttgcaggtccccgtagcaccctgagcctgtaccttgggtggcacttgttatgctatcctgtgctagccgtttgtgcctcgtctcgctgttagattgtgagttcccatgggcagagacccactgtcgttccccgtgtgtccccagcccggtccctgtcacatttgttaaatgaaagaacaatgaagcccagtgtaacgtcagtccacagaaatagccacagcttccagtggtggccgtagacttggctcggaacttagtggcaccagagtaactctagtcagttacagtaaaatccactgtgtgtggaaggcagaagctagcggttgtatcccaagcatcttttgtatttgtctttatactttgctgaattctctgaaatacctattactgtatgttgcttttctaaataaatgtattgtgaaaccaaaaaaaaaaaaaaaaa

SEQ ID NO: 49 - DNA, 5516 bp, Human
ccggccggaattccggctggatttcctcccggacatgacggtcgagggccgcctgctcgttcctgacagaattaacggcacagccaacaagatgaacggagctttggatcactcagaccaaccagacccagatgccattaagatgtttgtcggacagatcccccggtcatggtcggaaaaggagctgaaagaactttttgagccttacggagccgtctaccagatcaacgtcctccgggaccggagtcagaaccctccgcagagtaaaggttgttgtttcgtaacattttatacaagaaaagctgcacttgaggcccagaatgcactgcacaatattaaaactttacctgggatgcatcatcccattcagatgaaacctgcagatagtgaaaagtccaacgctgtggaagacagaaaattgttcataggaatggtttcgaagaaatgtaatgagaacgacatcagggtgatgttctctccatttggccagatagaagaatgccggatcctccggggacctgatgggctgagtcgaggctgtgcgtttgtcacattttctacaagggcaatggcacagaatgcaatcaaagccatgcatcagtctcagaccatggagggctgctcttcacctatcgtggtgaagtttgctgacactcagaaggacaaagagcaaaggcgcctccagcagcagctcgctcagcagatgcagcagctcaacactgccacctgggggaacctgacagggctgggcggactgaccccacagtatctggcgctcctgcagcaggccacctcctccagcaacctgggtgcgttcagcggcattcaacaaatggcaggcatgaatgctttacagttgcagaacctggcgacgctggctgctgctgcagctgcggcccagacctcagccaccagcaccaatgcaaaccctctctctaccacgagcagcgccctgggagccctcacgagtcccgtggctgcttcaacccccaactccactgctggtgcagccatgaactccttgacctctctcgggactctgcaaggactggctggagccactgttggactgaataatattaatgcactagcagttgctcaaatgctctcaggtatggcggctctgaatggaggacttggcgccacaggcttgacgaatggcacggctggcaccatggacgccctcacccaggcctactcaggaattcaacagtacgcagccgccgcgctgcccactctgtacagccagagcctgctgcagcagcagagcgctgcaggcagccagaaggaaggtccagagggggcaaacctctttatttaccaccttccacaggaatttggagaccagcacattctgcagatgttcatgccttttggaaatgttatctctgctaaagtcttcattgacaaacagaccaatctgagcaagtgctttggttttgttagctacgacaatccagtctctgcacaagctgctatccaagctatgaatggctttcagatcggcatgaaacgcttgaaggtgcagctgaagcgttccaaaaacgacagcaaaccttactgatcctaaccccagaggctccctgctctcattttagctttcttaggacatcttcatgcccgttagttcatcgtttgcctagcatgtccctgtggcgtctcaaaaaaaagtttcatcgtcccgtcattgtttctgatgtctttctgacctcacatcatatttggttctcctactgacctttgatctagtttgacctttgaaatttgcatgtgacctcatctagctatgaattctgggaagtcaatgtgaaaaacattgctgcattcatgcaagactgaaatttattattagacaaattcattatagaaaaaacctgtggcaaaaacgtttctttcttattttttttcttttcctaaaacagacttgaaagtattatacagggattggcattcttcccggtcactggtaacaatagcaatatgtgtccagggacacagaatgttggtttctaacagactacttccaaaaacagtttgagaaaaaaactgtctgattttaagtctctagaggtctgtaatagtttttacatttttcaggcagtgtaaagttttttgataaggccattttaggtggctcactttctcattaagatatatatatagaaccactttttgtagattagtataagaaaaatatttaccctgttttggggcaaatgctacctatttgtgtcaccttttgctgaactcacagttagacaatccatggtttaatgcacatgaaattacctatattttatactgtttcaatgtacaggagaaaggttactgtaaactgtgttatgttggtgcttctgtgaattaagttgtggtttcatcatgagtcttaatgttctttgttgataagacaagtttagaattggtttacttaatacaaaaaaaaaaaaaagaatttcaaaaaaaaaagttgtttgcttaaaaaaaatttcatgtgagggaaaaaaaaaaaaacctattccagaataagttttgtgttggcttgtgaagcattgatgtcattttttttaattgtggactatttagatgtgtttgtgttcagcaaaatgtgatctgtttttttcttttaaagaaaaaaagtgaaaatatatagtgccaaattccaaaggtacttccttcctagagcttcagtgtgtttcttgtgagaagtaatttgataacatgggtattttattatgtgttttgtataaatccctaatatttaaaaaaaaaaacaaaacaaaaaaaggttacaaagtttgttaacttgctatcctgtggtcttgttgcctgaaattgttattgtttgttatttctctctgatgttttttgtaagacattgtataagtgcccatgtcccacttttttaaccactccgcacatcagtgctgtgaaggcaacctcaccatgtattttcttcataatctatggaaacctctaaggtgagaaagttttgaacttttaaccctttctacccagagctatctggaatgttgatgactttttatactgtcatgatttgagtttgttttggggtgtttccaatttggatttttttccctgcatctatcctctaagttgtttcggtttgactactttgttctttggttaagatccaaaagaaaacagaaaacaattccacgaggccaatctaaagggaaaaaatcctacactacttttactacttttgattatttctcatttttgggaaaagaattcctaatgtgctactagaattccttcttcagttttaacgagtaattggataaaccctgagggaaaacggaggtagattcagcacctaacaatcctgtatgcttttgagatcacgtttagtgctatgtcctagtctagaatattttcatataccttgcagtaaaaccactttgtggcaggacagtctcttgaggggttttgtttctgtttcctaaatactcctaaataatatttctaatcagccattatgctggggcatctctgatcccagtaggtacctctgaatataccaggtgtctggagttagaagcccatagccctttcccagcctttttggtttttttaattgaacacatttcatctaagtaaagctcagttctttatcacaatttactgaccaaatacctagcaccagttcctgctgccactttttaaagtgccatatgactttctacgaacaggtaccttgctgtcttgacaaatcctaatgtcacgcctacagccccaacacaagctccagtcttcctcttcggcatgccctggaagcttcttggcctcagctccccttccccgctcagcaccctgttaggatcagtgtgtgtggatgggatagccctgggatggaaaggactagcctctactgatgcaaaaaaacaaaaagcaacacaaacgtttccttcttatagcacatgcacttccttacaatgacatgatttgtattatcctcacatgtgtttactactgctggggccttccttcatcctctgagggctattttgtactttctgcagcaatcagcttaataacaacacttattgcacctgtctctctctgagaacacggtgtgtctcgacacgtaccacgtaacgtggaaacacaagagcccaccacttgaatttctaagaccatttcattctgaaacttcttatcaattacctaaatctcaacgaaaaacaatttactgaagccgactcccctccccatctccctctcaacctcaacccacctgcatgcatctcccccagaggaaaacactgagggtaggggacagggaggctcaggacgcgccctctgaatcggagtgtttcttcttcacaagtcaccaagagaggacatgagggggaaagtccttttttgcccttctccaaaaaataaccttccacagagacaaactgtccttctatccacttttatcttttaataaatatcaaaaggaaaaagctgcaagggtgcaaagggcctgtgccagaagaaaacacacacagggaaaccgctttttttaatcaattgtagagaatagtcatttttaatctaaattagagaattgtgatacaatggcagtcctcaaaggcgtaacgagttcatctttctttcaccataggggttatagttggcttgtgctactctggaatcattttactgtttgtttttattatcttaagtgctaattaaaaaaaaaataaaattttaaaaaaacctgtagtttcattacctttttgaataatgtcatacaaaaaatgtatttgtttttttgtgctgtgagaattgatgtttgtagattaataatcattttgtttagaattacaaaatagtttttaaatattgtctgagaaaagccaaagttaatgcaacctagtggaaactgtaagaccatttgagtattgtttgttttattgatgcatttggattttgttgtttgatggaatttgagccaaaaaaaaaaatacgcaggctttcctatttctacaactgattgtacttatgcattttgtaccagtggaactttttatactggagattaaaaaaaaaatggaaatttttgtggcttgctctggtgggcccctgacaatgactgatttcaagtttgatttcgggttgattgattgattgattgatagaaagaaagttgcttttcttttgagaattaaaaactttggcttgatttcttttttccctttgcttatatctagcattagaattttgtcttaaaataacagcggtaagtttcactttttattctgtattgtgcagttacacaataaggtaattagatttagaagtactcagtcactttaagtggataaatgtattagttaaaactttagggtttgcttttttgctgtttagatcaaagttttttctgattcttctgtcctcattgtgaacataaccgtgtagttgaaacagtcaaacttatttttgtaatgtatgttattgtgtgatgcagtttttttgcttctgtctccaatattaaaccattttcc

SEQ ID NO: 50 - protein, 509 aa, Human
MTVEGRLLVPDRINGTANKMNGALDHSDQPDPDAIKMFVGQIPRSWSEKELKELFEPYGAVYQINVLRDRSQNPPQSKGCCFVTFYTRKAALEAQNALHNIKTLPGMHHPIQMKPADSEKSNAVEDRKLFIGMVSKKCNENDIRVMFSPFGQIEECRILRGPDGLSRGCAFVTFSTRAMAQNAIKAMHQSQTMEGCSSPIVVKFADTQKDKEQRRLQQQLAQQMQQLNTATWGNLTGLGGLTPQYLALLQQATSSSNLGAFSGIQQMAGMNALQLQNLATLAAAAAAAQTSATSTNANPLSTTSSALGALTSPVAASTPNSTAGAAMNSLTSLGTLQGLAGATVGLNNINALAVAQMLSGMAALNGGLGATGLTNGTAGTMDALTQAYSGIQQYAAAALPTLYSQSLLQQQSAAGSQKEGPEGANLFIYHLPQEFGDQHILQMFMPFGNVISAKVFIDKQTNLSKCFGFVSYDNPVSAQAAIQAMNGFQIGMKRLKVQLKRSKNDSKPY

SEQ ID NO: 51 - DNA, 2207 bp, Human
ccccttcctgtggggttcattggggcatcccctttctgctgcaggaacctctcatcagaccgcctgagggaagcggcgcccggagacccgccccggcccggtccacattctccccaggaagccggactctatggggcgggaccctgggggagcctgagccgagcccggagccagccccgaacccctgaacctccagccaggggcgccccgggagcagccagcccgtgggcgagccgcccgcccgccgagcagccatgagcgagacggtcatctgttccagccgggccactgtgatgctttatgatgatggcaacaagcgatggctccctgctggcacgggtccccaggccttcagccgcgtccagatctaccacaaccccacggccaattcctttcgcgtcgtgggccggaagatgcagcccgaccagcaggtggtcatcaactgtgccatcgtccggggtgtcaagtataaccaggccacccccaacttccatcagtggcgcgacgctcgccaggtctggggcctcaacttcggcagcaaggaggatgcggcccagtttgccgccggcatggccagtgccctagaggcgttggaaggaggtgggccccctccacccccagcacttcccacctggtcggtcccgaacggcccctccccggaggaggtggagcagcagaaaaggcagcagcccggcccgtcggagcacatagagcgccgggtctccaatgcaggaggcccacctgctccccccgctgggggtccacccccaccaccaggacctccccctcctccaggtccccccccacccccaggtttgcccccttcgggggtcccagctgcagcgcacggagcagggggaggaccaccccctgcaccccctctcccggcagcacagggccctggtggtgggggagctggggccccaggcctggccgcagctattgctggagccaaactcaggaaagtcagcaagcaggaggaggcctcaggggggcccacagcccccaaagctgagagtggtcgaagcggaggtgggggactcatggaagagatgaacgccatgctggcccggagaaggaaagccacgcaagttggggagaaaacccccaaggatgaatctgccaatcaggaggagccagaggccagagtcccggcccagagtgaatctgtgcggagaccctgggagaagaacagcacaaccttgccaaggatgaagtcgtcttcttcggtgaccacttccgagacccaaccctgcacgcccagctccagtgattactcggacctacagagggtgaaacaggagcttctggaagaggtgaagaaggaattgcagaaagtgaaagaggaaatcattgaagccttcgtccaggagctgaggaagcggggttctccctgaccacagggacccagaagacccgcttctcctttccgcacacccggcctgtcaccctgctttccctgcctctacttgacttggaattggctgaagacacaggaatgcatcgttcccactccccatcccacttggaaaactccaagggggtgtggcttccctgctcacacccacactggctgctgattggctggggaggcccccgcccttttctccctttggtccttcccctctgccatccccttggggccggtccctctgctggggatgcaccaatgaaccccacaggaagggggaaggaaggagggaatttcacattcccttgttctagattcactttaacgcttaatgccttcaaagttttggtttttttaagaaaaaaaaatatatatatatttgggttttgggggaaaagggaaatttttttttctctttggttttgataaaatgggatgtgggagtttttaaatgctatagccctgggcttgccccatttggggcagctatttaaggggaggggatgtctcaccgggctgggggtgagatatccccccaccccagggactccccttccctctggctccttccccttttctatgaggaaataagatgctgtaactttttggaacctcagttttttgattttttatttgggtaggttttggggtccaggccattttttttaccccttggaggaaataagatgagggagaaaggagaaggggaggaaacttctcccctcccaccttcacctttagcttcttgaaaatgggcccctgcagaataaatctgccagtttttataaaaaaaaaa

SEQ ID NO: 52 - protein, 380 aa, Human
MSETVICSSRATVMLYDDGNKRWLPAGTGPQAFSRVQIYHNPTANSFRVVGRKMQPDQQVVINCAIVRGVKYNQATPNFHQWRDARQVWGLNFGSKEDAAQFAAGMASALEALEGGGPPPPPALPTWSVPNGPSPEEVEQQKRQQPGPSEHIERRVSNAGGPPAPPAGGPPPPPGPPPPPGPPPPPGLPPSGVPAAAHGAGGGPPPAPPLPAAQGPGGGGAGAPGLAAAIAGAKLRKVSKQEEASGGPTAPKAESGRSGGGGLMEEMNAMLARRRKATQVGEKTPKDESANQEEPEARVPAQSESVRRPWEKNSTTLPRMKSSSSVTTSETQPCTPSSSDYSDLQRVKQELLEEVKKELQKVKEEIIEAFVQELRKRGSP

SEQ ID NO: 53 - DNA, 2420 bp, Human
tccggggcggcccccggcagccagcgcgacgttccaaaatcgaacctcagtggcggcgctcggaagcggaactctgccggggccgcgccggctacattgtttcctccccccgactccctcccgcccccttcccccgcctttcttccctccgcgacccgggccgtgcgtccgtccccctgcctctgcctggcggtccctcctcccctctccttgcacccatacctctttgtaccgcaccccctggggacccctgcgcccctcccctcccccctgaccgcatggaccgtcccgcaggccgctgatgccgcccgcggcgaggtggcccggaccgcagtgccccaagagagctctaatggtaccaagtgacaggttggctttactgtgactcggggacgccagagctcctgagaagatgtcagcaatacaggccgcctggccatccggtacagaatgtattgccaagtacaacttccacggcactgccgagcaggacctgcccttctgcaaaggagacgtgctcaccattgtggccgtcaccaaggaccccaactggtacaaagccaaaaacaaggtgggccgtgagggcatcatcccagccaactacgtccagaagcgggagggcgtgaaggcgggtaccaaactcagcctcatgccttggttccacggcaagatcacacgggagcaggctgagcggcttctgtacccgccggagacaggcctgttcctggtgcgggagagcaccaactaccccggagactacacgctgtgcgtgagctgcgacggcaaggtggagcactaccgcatcatgtaccatgccagcaagctcagcatcgacgaggaggtgtactttgagaacctcatgcagctggtggagcactacacctcagacgcagatggactctgtacgcgcctcattaaaccaaaggtcatggagggcacagtggcggcccaggatgagttctaccgcagcggctgggccctgaacatgaaggagctgaagctgctgcagaccatcgggaagggggagttcggagacgtgatgctgggcgattaccgagggaacaaagtcgccgtcaagtgcattaagaacgacgccactgcccaggccttcctggctgaagcctcagtcatgacgcaactgcggcatagcaacctggtgcagctcctgggcgtgatcgtggaggagaagggcgggctctacatcgtcactgagtacatggccaaggggagccttgtggactacctgcggtctaggggtcggtcagtgctgggcggagactgtctcctcaagttctcgctagatgtctgcgaggccatggaatacctggagggcaacaatttcgtgcatcgagacctggctgcccgcaatgtgctggtgtctgaggacaacgtggccaaggtcagcgactttggtctcaccaaggaggcgtccagcacccaggacacgggcaagctgccagtcaagtggacagcccctgaggccctgagagagaagaaattctccactaagtctgacgtgtggagtttcggaatccttctctgggaaatctactcctttgggcgagtgccttatccaagaattcccctgaaggacgtcgtccctcgggtggagaagggctacaagatggatgcccccgacggctgcccgcccgcagtctatgaagtcatgaagaactgctggcacctggacgccgccatgcggccctccttcctacagctccgagagcagcttgagcacatcaaaacccacgagctgcacctgtgacggctggcctccgcctgggtcatgggcctgtggggactgaacctggaagatcatggacctggtgcccctgctcactgggcccgagcctgaactgagccccagcgggctggcgggcctttttcctgcgtcccagcctgcacccctccggccccgtctctcttggacccacctgtggggcctggggagcccactgaggggccagggaggaaggaggccacggagcgggcggcagcgccccaccacgtcgggcttccctggcctcccgccactcgccttcttagagttttattcctttccttttttgagattttttttccgtgtgtttattttttattatttttcaagataaggagaaagaaagtacccagcaaatgggcattttacaagaagtacgaatcttatttttcctgtcctgcccgtgaggtgggggggaccgggcccctctctagggacccctcgccccagcctcattccccattctgtgtcccatgtcccgtgtctcctcggtcgccccgtgtttgcgcttgaccatgttgcactgtttgcatgcgcccgaggcagacgtctgtcaggggcttggatttcgtgtgccgctgccacccgcccacccgccttgtgagatggaatcgtaataaaccacgccatgaggaaaaaa

SEQ ID NO: 54 - protein, 450 aa, Human
MSAIQAAWPSGTECIAKYNFHGTAEQDLPFCKGDVLTIVAVTKDPNWYKAKNKVGREGIIPANYVQKREGVKAGTKLSLMPWFHGKITREQAERLLYPPETGLFLVRESTNYPGDYTLCVSCDGKVEHYRIMYHASKLSIDEEVYFENLMQLVEHYTSDADGLCTRLIKPKVMEGTVAAQDEFYRSGWALNMKELKLLQTIGKGEFGDVMLGDYRGNKVAVKCIKNDATAQAFLAEASVMTQLRHSNLVQLLGVIVEEKGGLYIVTEYMAKGSLVDYLRSRGRSVLGGDCLLKFSLDVCEAMEYLEGNNFVHRDLAARNVLVSEDNVAKVSDFGLTKEASSTQDTGKLPVKWTAPEALREKKFSTKSDVWSFGILLWEIYSFGRVPYPRIPLKDVVPRVEKGYKMDAPDGCPPAVYEVMKNCWHLDAAMRPSFLQLREQLEHIKTHELHL

SEQ ID NO: 55 - DNA, 6974 bp, Human
cggtgctggagaagtttgcgctgcggttcgtgagcgcagggtgcgggccccgccggccgctgcgcgcccgctgccatggctttccgcaggaggacgaaaagttacccgctcttcagccaggagttcgtcatccacaaccatgcggacatcggcttctgcctggtgctctgcgtcctcatcgggcttatgttcgaggtcacagccaagactgcctttctatttattttacctcagtataacattagcgtgcctacagcagacagtgagaccgtgcactaccactatggccctaaggacctggtcacaatcttgttctacatcttcatcaccatcatcttgcatgctgtggttcaggagtacattttagataaaatcagcaaacggcttcatctctccaaagtcaaacacagcaagttcaatgaatctggacagctggtcgtctttcatttcacctcggtgatttggtgcttctacgtggtggtgacggaaggatacttaacaaacccaagaagcctctgggaagactacccgcatgtgcacctccccttccaggtgaagtttttctacctatgccagctggcctactggctgcacgcacttcctgagctatacttccagaaggtacggaaggaggaaattccccgccagctccagtatatttgcctgtacctggtgcatatagctggagcatacctcttaaacctgagccgcctgggcctgatcttgctgctgctgcagtactcaactgagttcctcttccacacggctagactcttctactttgcagatgaaaacaacgagaaactgttcagtgcctgggctgctgtttttggggttacccgcctcttcatcctcacccttgccgtgctggccattggctttggactggctcgcatggaaaaccaggcatttgatcccgagaaagggaacttcaacactttgttttgcaggctctgcgtgctgctgctggtgtgtgccgcccaggcctggctcatgtggcgcttcatccactcccagctgcggcactggcgggaatactggaatgagcagagtgcaaagcggagagtcccagccacacccagactaccagccaggctcatcaagagggaatctggttaccatgaaaatggagtggtgaaggcagagaacggaacctccccacggactaagaaactcaagtctccctaaggccaaagtgctaagaacaggaatcctcttggtgggggccgagcagggggcaaggagcccaggccccctccctgcctcctccttcctgcctgtgatgctccgtctcaaacagccgaaacctgtcttgcaatggggggagggggcgtttcgctttccttcttcttggcttcctcttattcttccacaaaccattctcaataaagccaaaaatctttctctttctccccctcaggccacctcctgtcctcactcctgtcctgtgctggcttttctggaacgccaggcgcccatggctggcacctttctgcttgctctgtttcttgccttatggctgctgcttttcctttttacttcctattttcaccttatcttgcaatttttctgtctgatttttacaatgggaggggagctaagattgcagtcctgtccttcggtcccccagggcctgccggtcagaagcctggggctggtaggcccttggtggtcctcatgtggatgggcaagaagagagcggccatctcggatcataatctccttggtgctgattaactgacgagatatatgattccagttctgcatgtaccatcttgaggcacagcagccactgctcgttgtaaatgccaaggcatttggctttgggacgtgacaactcaatccagaaggatggtgtgaactcggttgggtcccgtgactcgagctcctaccagtggctggccgcggattggaagccagcctgctgtcgctctgtggggaggacatgtcttcccactgcttagagcgagagcagagcaaactgcgcagcaggcacctccagaaaggtaatggtggcagaacccacagtggagtcgacctaggcctttctccagcagtcccagtcgccattgctttttcagccattcacaagcattcaaaaccaaaccaaacagcagttcatatacctgcctgagataggctggtcctcacctccagagccagccagccccgtcaggggccaaacttactaccttgacttcatctctagctgcagaaacactaagtctcaagggcttcagccccatgctggtcccttggtgttcagggagggtcacttggaccgctgttcatctggccgcccttgttgagtgttctttggaattgtcgttttttgagcacaactacagcattttagactgcatgaaaccatgactgactgagagtcactctctgggtagatgataggcgcctttctggccccttccctcacagattctttcccctcccctccacctgaagagaaggcctccaagtccttttggtgccttgtgaggacttttagaaggggcgttcagctttaaaaagccggtcctaattacggccggacgcagtagcttacgcctgttatcccagcactttgggaggtcgaggtgggcagatcacctgaggttaggagttcaagaccagcctggccaacatggtgaaaccccatctctactaaaaatacaaaaaattaggtgtagtggcaggcacctgtaatcccagctactcgggaggctgaggcaggagaatcgcttgaacctagaaggtggaggttgcagtgagcggagattgtaccatggcactccagcctggacaacaagagcgaaattctgtctaaaaaaacaaaagtcccaattaagaacctccgaactctgttttgaggcaaaggggagtagttcttggtaggtgcaggaatagtagtgtcatttggaatactggtcatctttctgacatcacagtagaaaccaaaccttggatttagattcaaaaggggggaaatgggtcttttcatcaaggcaactccccttctccaagtcacttacatcatagataaattttagcttcccagtaactgagggatttgtttcctaacgccattggaggccttcatccctctctacgataaggttgcagaaatgggaagagctacccgtggttgcttttgattacccttaggaagtgagacagtgtttttgaaaatatgtatttctcccatttctccctctccttccctgacacttctctgggctgcacagcagaaacgttggtaaaagggcagtttggtttcaacacagcagacctgatatgggatcccttagccactttagtcaaacagccctgacagagtctataattgagttcaggccccccaccttgcctaataactgcaaatcgcatgttcagccagcagcctcctaagcccaccttcctcccccattagagaacacccatcctaggtgctctccaggctgtgtcattggcagggcttcacatgcaggaggcctctctcaggtgagtccaggttaaactgttgagttgtggcttcaacagatatgtatggcatgctgggatgtgccaggtgcctgcgttgtgccagttgctggagaggtagtgtgagcagagcagctgaaatcttgccatcaagcaaccctcattctcatgcctgtaggtttccattgctctgtcccaggacacttgcgtgccagagacgccacaacttcatgtccctgtctcttgcaagctccccgtgctgccagtacttcatgccttggatgtggtcccaccagcccagtggctggggtcagcttaggctctgcttcccagtggacgggtgtgctaagggtttattttatgtaaaaaaaaaaaaaaaacaaaaaaaaaccctgagaccatgagtggggctggcatcttgccagcctgggcttcagggatgtttggggggggtggttagagggtagttgtagggtactttgtcacccccctccccctgccaccctccctggcacgtttatttcacagcagagccaagtctgtggcaggttgacacagactgtgttgccagagctgaaataattccacttcatcctatgagcgtgttgggctagcttgttctaattttggccactttggctgttttcttcagttttatgcattctctcctgccccaaagtgccaagccatttgtgaaggctctgccagacacctccaagcttgagagctcagcaccatgcaccaagagcaggagaaaagacgtaaacctaccccagcaactgtggcctctcgacagccctggctaactaacttacatttgtggggaagccaacagacacagcaggaggagagggaggtggcgctggtggaccaaggatctgtgctacccgctcccctccttggaggtgcagtgatgatgggagttatttttaccatccgggcgctgatagctgcactattaataaattgcatgtgttccttttgaaggtaggggatggttctgggtgagaggggagcaggctgagccggcgggggatctgctgtcctcccttttgagtcagttctaatcccatgtgtgtctgggccaccagaccgaaatggttgctgagaaacttgtctgttcatgtcccaaggcataacttcccaacatttaagaaaccccaatagacacctctgccctggccacgttcacagatccttctcttgaccggaaaccctgggaccctaagaacccctgaagcttggggtgggtgtgtgcttctggggtctcttttgggacctcctttgtcagtaccccttcttttttctaagcagctaataagaggttgggtgaaagagtgcatctcctcccaggattccacaacaaaattcttatcttccatggatgctttaattggaagtgggttgccgacccccttgtgcctagaaaaggcctttgcttgggtttcctttgtatgcttcagccttcctagttggtttttctaggcctggtgtgagaggtagggaagtctgcacataactaattcttttgcttaagggcctatggcacaagtgcacaaacttcaattcttgatgttctaagctctctcctctaacagagggagtgctgaaagcttttgagtcaagacaatggagtgctcttcctccctcactctgccttccgagcttatggttccttttctcaggagaggattttcaggattattggaggattaggtcattgtcagatgactggaaaacctaaataggatctctctccagctcaaggttgtcccagtgaggaagactttaccaacttctcactctaccccactactcacatgagtgttagctccaccttgcaaaggctgaagaccagttctccccagtgaaagctgcctcattcttttatggagttccctggagtggcagagctataaagacgagcattgggatttgcagtctccatgtagcctttcgtgcttggcaacccctgtagactttttgtcccaagcagattgcgtgcgtgcgcctgtgtgtgagaataagtgccttactttgctgtgtggttttcaacttgtactccgtggccagcccccagttgccagggctcgacggcagccaaggacaccatacctcagtatagttatatataaaatggacacggattgtgacagtttcaccccatttgtttctaaccccgctgcccaggattagggtctgtggtgtgttctgttttgtttttggtttctcccttgtgtcagttctcttctggcccagctgggtggctgtggaagtctgtgaggtggcccaaccacaagcatacctattaagagaagcccagagcttccagcccccacttcgaaaactctcctctggccccacatagcaaactccttctccgttattttccccacccccagattttttttaaaaggcccacttgccataacctcttttggtctattttgcttcccattcagcccaaagtttatatgataaaggtgtttacttttacttcccagtctccaagtgctaacacataaacacatacatgtctgactgttgcagaactgttcgagctcctaattcagtgttaccttgttttagtcgcagcaaccctctcccctaccccttgcccgcccacgtttttctcactcttccgggttgtgcaataactctcccagccagtggtcctttccacagcctttctgtcccttaaaacacctgcaactgggggagaaatgggacccatgggagggggagtcatcatcccttacacaagaaatagccactttccttttgttgtcattcttgtgatcctgggtgggtttctgtggcactcttttagaacatgtagcatcatcttagaggtctatttttaaaaaatgtgttgaagaggaaaaaaccattctcacgatggggcttaagtcattgtccaggaataagattggcgtggtgcccatgacatcaccgtcactctgcctaaaagcactctagagctacttgttcacgtggagaggaaggatattttgcgaagcaacagccgcaggtggagagccctgttcacctgatagggtctagctgtgacagtaaatataataccgctgtttccttgggtacagatttgagtgttcatgtgatgagactgtaaacctcatttttcggttcctctgtttaaaaaaacatctgaaggatgaactaaggctgctggtgccctgagcaactgataatgcaaatgtggacaaagtgtctgttttctactctagcctgttcatatggaccaaatttcaacaaggaactcaaggaaaatttgtacctgccgtatttatgctttcatgtaaaaaagggttggggggaggggtgtctttttgcttttggtgaactttttttcaaaatcatttttccactgtttctgtctggttttaaaacaaattacagttttgtatggattttttaaatgtacattttggaacaaatgatcaaatattttctgaaataacaataaaaggcagaaaatt

SEQ ID NO: 56 - protein, 370 aa, Human
MAFRRRTKSYPLFSQEFVIHNHADIGFCLVLCVLIGLMFEVTAKTAFLFILPQYNISVPTADSETVHYHYGPKDLVTILFYIFITIILHAVVQEYILDKISKRLHLSKVKHSKFNESGQLVVFHFTSVIWCFYVVVTEGYLTNPRSLWEDYPHVHLPFQVKFFYLCQLAYWLHALPELYFQKVRKEEIPRQLQYICLYLVHIAGAYLLNLSRLGLILLLLQYSTEFLFHTARLFYFADENNEKLFSAWAAVFGVTRLFILTLAVLAIGFGLARMENQAFDPEKGNFNTLFCRLCVLLLVCAAQAWLMWRFIHSQLRHWREYWNEQSAKRRVPATPRLPARLIKRESGYHENGVVKAENGTSPRTKKLKSP

SEQ ID NO: 57 - DNA, 7137 bp, Human
gtactctcgcggtatttgtcccgactctcgcggggtttagcgtggcattgggaggcccggcctgggggaggagacggcgttccgttagcggcgttggggtttggctgcagtggcagtgctttctcttctgctcacggggacccgctcaggctggaggccagccagctcttgccgccacctcggtcgcgatgggggcgcaggaccggccgcagtgccacttcgacatcgagatcaaccgggagccggttggtcgcattatgtttcagctcttctcagacatatgtccaaaaacatgcaaaaacttcctttgcttgtgctcaggagagaaaggccttgggaaaacaactgggaagaagttatgttataaaggttctacgttccatcgtgtggttaaaaactttatgattcagggtggggacttcagtgaaggtaatggaaaaggtggagaatcaatttatggtggatattttaaagatgaaaactttattctcaaacatgacagagcgttccttttatcaatggcaaatcgagggaaacataccaatggttcccagtttttcattaccacaaagcctgctccacacctggatggggtgcatgtagtctttggactggttatttctggttttgaagtaatcgaacaaattgaaaatctgaagaccgatgctgcaagcagaccatatgcagatgtgcgagttattgactgtggagtacttgccacaaaatcaataaaagatgtttttgagaaaaaaaggaagaaaccaactcattcagaaggctcggattcctcttccaattcctcctcttcttcagaatcatcttcagaaagtgaacttgaacatgagagaagcagaaggaggaaacataagaggaggccaaaagttaaacgttctaaaaagaggcgaaaggaagcaagcagttcagaagagccaaggaataaacatgcaatgaacccaaaaggtcactctgagaggagtgataccaatgaaaaaaggtcagttgattccagtgctaaaagggaaaaacctgtggtccgcccagaagagattcctccagtgcctgagaaccgatttttactgagaagagatatgcctgttgttactgcagaacctgaaccgaagattcctgatgttgcacccattgtaagtgatcagaaaccatctgtatcaaagtctggacggaagattaaaggaaggggcacaattcgctatcacacacctccaagatcaagatcctgttctgagtcagatgatgatgacagcagtgaaactcctcctcactggaaagaggaaatgcagagattaagagcatatagaccacctagtggagaaaaatggagtaaaggagataagttaagtgacccctgttcaagccgatgggatgaaagaagcttgtctcagagatccagatcatggtcctataatggatattattcagaccttagtacagcaagacactctggccaccataaaaaacgcagaaaagaaaaaaaggttaagcataaaaagaaagggaaaaagcagaaacactgcagaagacacaaacaaacaaagaagagaaggattcttataccgtctgacatagaatcctcaaaatcttccactcgaagaatgaaatcctcttgtgatagagaaaggagttctcgttcttcctcattgtcatctcatcactcatcaaagagagactggtctaaatctgataaggatgtccagagctctttaacccattccagcagagactcatacagatcaaaatctcactcacagtcttattctagaggaagctcaagatcaaggactgcgtcaaagtcctcatcacattctcgaagtagatcaaagtccagatctagttccaagtctgggcaccgaaagagagcatcaaaatcaccaagaaaaacagcttctcagttaagtgaaaataaaccagttaaaacagaacctttaagagcaaccatggcacaaaatgaaaatgtagtagtacaaccagttgtagcagaaaatattcctgtaataccactgagtgacagtccccccccttcaagatggaagcctggacagaaaccttggaagccctcttatgagcgaattcaggaaatgaaagctaaaacaacccatttgctacccatccaaagcacttacagtttagcaaatattaaagagactggtagctcatcatcctaccataaaagagaaaaaaattcggaaagtgatcagagcacttattcaaaatacagtgatagaagttcagaaagctcaccaaggtcaaggagcagatcttctaggagtagatcttattccagatcatatacaagatcacgtagtctagctagttcacattcaaggtctaggtctccatcatctagatctcattcacgaaataaatacagtgatcattcacagtgtagtagatcatcttcatatacttctattagcagtgatgatggaaggcgagctaagaggagacttagatccagtgggaaaaaaaatagcgtttcacataaaaagcatagcagcagctctgaaaagacacttcacagtaaatatgtcaaaggtagagacaggtcttcatgtgtgagaaagtatagcgagagcagatcatctttagattattcttcagacagtgagcagtcaagtgttcaggccacacagtcagcccaggaaaaagagaagcagggccaaatggaaagaacacataataaacaagaaaaaaacagaggtgaagaaaaatccaagtctgaacgggaatgccctcattcaaaaaaaagaactttgaaagagaatctttctgatcaccttagaaatggcagtaagcccaaaaggaagaattatgctggtagtaaatgggactctgagtcaaattcagaacgagatgtcactaaaaacagtaaaaatgactcccatccatcctctgacaaggaagaaggtgaggccacatccgattctgaatcagaggttagtgaaattcacatcaaagtcaaacccacaaccaagtcgtccacaaatacttcactgcctgatgataatggtgcttggaaatcaagcaaacagcgcacatcaacttctgactctgaggggtcctgttccaattcggaaaacaataggggaaagccacaaaagcacaaacatgggtcaaaggaaaatcttaaaagagaacacaccaaaaaagtgaaagagaaattgaaagggaaaaaagacaaaaagcataaggctccaaaacgaaagcaagcatttcactggcagcctccactagaatttggtgaagaggaggaggaggagattgatgacaagcaagttactcaggaatcaaaagagaaaaaagtttctgaaaacaatgaaaccataaaagataatattctaaaaactgagaaatccagtgaagaggacctttcaggtaaacatgatacagtgactgtttcatcagatcttgatcagtttactaaagatgatagtaaactcagtatttctcccacagctttaaatactgaggaaaatgtggcctgtttacaaaacattcagcacgttgaagaaagtgttcccaatggagtggaagatgtgcttcaaacagatgacaacatggagatctgcactcctgataggagttccccagcaaaagtagaggagacttcccctctaggaaatgcacggcttgataccccagatataaacattgttttgaagcaggatatggcaacggaacatcctcaagcagaggtagtaaaacaggaaagcagcatgtccgaaagtaaagtgttgggtgaagtggggaaacaggacagcagctctgctagcttggctagtgctggagaaagtaccgggaagaaggaggtggctgagaagagccagatcaacctcattgataagaaatggaagcccctgcaaggtgtggggaacctggcagcacctaatgctgccacatccagtgctgtggaagttaaggtgttgaccactgtgcctgaaatgaaaccacaaggcttgagaatagaaattaaaagcaaaaataaagttcggcctgggtctctctttgatgaagtaagaaagacagcacgcttaaaccgtagaccaagaaatcaggagagttcaagtgatgagcagacgcctagtcgggatgatgatagccagtccaggagtccaagtagatctcgaagtaaatctgaaaccaaatcaagacacagaacaaggtctgtctcctatagtcactcaagaagtcgatcgagaagttccacatcatcttatcgatcaagaagctactctagaagtcggagcagaggatggtacagcagaggccgaaccagaagccggagcagttcctaccggagttacaaaagtcacaggacgtccagcaggagcagatccaggagcagctcatatgatccccacagtcgatccaggtcctacacctacgatagctactatagcaggagtcggagtcgaagtagaagccagagaagtgacagttaccaccgaggcagaagttataatcggcggtccaggagttgtagatcttatggctctgacagtgaaagtgaccgaagttactctcatcaccggagccccagtgagagcagcagatacagttgaaaacgtccggatacaaattatatcttatttgtaaatatctggcaacttagcttaagaaatgtaatgacagtctgttgttctatttcaatatcagaggtgaatttcaaaaatagacacttcttaattgttactggttcatttacatgtggggagaagaatttaaaatacagatatgtctcctaaaaatatttttatgccacattttacagtagccaactatggaaatgaatttcattttcttgaatcaagaaatcgtgaaatttatctatgtataatttgcaatattattttaagtctatttcactctatcttacgtatcccttagaatacagattctttttgcctgtttttccagttttagcatatatgctgccaagcatagaactgtgaaggagaactgttaaaggcggccaaatatttatatactgattacatagagtcttgtacatatgtgctctaaaaacaaaccacccagaattgatactgttggtaaccaggagtataaggcagtggctctggggttcttaattcattcctaacttctttgatacttcacaggattaggaaagtggtcatcatacatcccacacagtctgtattacttcaggcttgtgggcaaggttaggaagaatcaatcagccttaactataaatacctgcactgtctctgaggacttactattttatgttctttttaatcaataccgatcagaagtttaggttataaaaacaattctacttcatgctttggtgcttggtaatttttggtgcgtctttaagcattactcttatatatcatatattaaaataccataaaaatgaaattcagacaaaatcactggcaccaaaaatggtttattctgagctgtcttcactttgactatttggggggcttctctcaagtacagatgtgggttggggtcccctggagcaggcaggattggcagtaagagatattggccactcaagtctactgtgtgtgtgtgcctctggaagagtgaagaatggacttcaaaagtaacatcaaaaatctaactgccaccatcctggagacattttgcagggctttcctttcaagtctttcaagtacaggatattaccacaacagcagctgaactgttgtaaccagcatgtttttcctatttccactgtgacctgcagctgactcaaagccttgcgtgacctgacccaggtgcaagagacaggggaagagggatagagggtatagcataaattacatattttcatggctttgggtggttcctccaaaaataattggacctgtaaaaactagtgtgtgtgtgtgtgtgtgtgtgtgtgtgtgtgtggtttttttttttaatctttactttgaatttgttccccaagtgtacttaatcaccttagtgccagtttaatccagttatgcagaagaaattcatattggttgcctgatgtagagctcagcaccaccctaccacaggccttgtctggtgtatttgggaagtggaaaagagccctcagttggagggagctgacaacccttggtggagggagggtgcccttgaatgtattaaaactatcacccaaagaaggtatgaaaacagggtaaggtggtcagttgtttgccaggtcaatagacagaaagtacattagaaaacaggacttaggccaaacaaacaatactggatactgaatacaaaacagtatgatttatattaaaggtttccaaaggttgcctgcaaaggagaatattactactagtcagcaggaaaaaaatgcattcagaacccaagcagaaactgccaaatgtaattaggttaagaaaagttacccttgggcagtgtattagttttctattgctgtgtgacaaattaccccaaatttagcagtttaaaaaacaatacccatagcagttctgtagctcatgagtctggcacagtgtggctggattctctgctcagggtcttaaaggctgaaataagggttggcaggacaacattccttcatggaggctctggggaagaatctgcttctaagttcattcaggttgttggcggaattcagttctttgctggctctcagctggaggcccctctctcacctcaaggctgcctgcattccttcttatgtggtcccctccagcttcaaaccagccttcctgctctttctcatgcttcatatctctctcccgtcctcctgttttaggggcatatgattagctcaagcccacagatatattttaaggttgattgtgcgatagaacataattgcaggagtactgtctcatctcatcatattcacgggttctggagattagctcattgaaagtgggaggggcattttcaaattctgcctaccacaggcaataactgcccatctcagctgtaggtggaatttttacccagaaaagataggccctagaagcctcatttcttttctccatggaaaaggacagccctctgctgcagcgttcaacttgtgtgtttactgacagagtgaactacagaaatagcttttcttcctaaaggggattgttctacattttgaagttattttttaataaaattgaattatgttgt

SEQ ID NO: 58 - protein, 1462 aa, Human
MGAQDRPQCHFDIEINREPVGRIMFQLFSDICPKTCKNFLCLCSGEKGLGKTTGKKLCYKGSTFHRVVKNFMIQGGDFSEGNGKGGESIYGGYFKDENFILKHDRAFLLSMANRGKHTNGSQFFITTKPAPHLDGVHVVFGLVISGFEVIEQIENLKTDAASRPYADVRVIDCGVLATKSIKDVFEKKRKKPTHSEGSDSSSNSSSSSESSSESELEHERSRRRKHKRRPKVKRSKKRRKEASSSEEPRNKHAMNPKGHSERSDTNEKRSVDSSAKREKPVVRPEEIPPVPENRFLLRRDMPVVTAEPEPKIPDVAPIVSDQKPSVSKSGRKIKGRGTIRYHTPPRSRSCSESDDDDSSETPPHWKEEMQRLRAYRPPSGEKWSKGDKLSDPCSSRWDERSLSQRSRSWSYNGYYSDLSTARHSGHHKKRRKEKKVKHKKKGKKQKHCRRHKQTKKRRILIPSDIESSKSSTRRMKSSCDRERSSRSSSLSSHHSSKRDWSKSDKDVQSSLTHSSRDSYRSKSHSQSYSRGSSRSRTASKSSSHSRSRSKSRSSSKSGHRKRASKSPRKTASQLSENKPVKTEPLRATMAQNENVVVQPVVAENIPVIPLSDSPPPSRWKPGQKPWKPSYERIQEMKAKTTHLLPIQSTYSLANIKETGSSSSYHKREKNSESDQSTYSKYSDRSSESSPRSRSRSSRSRSYSRSYTRSRSLASSHSRSRSPSSRSHSRNKYSDHSQCSRSSSYTSISSDDGRRAKRRLRSSGKKNSVSHKKHSSSSEKTLHSKYVKGRDRSSCVRKYSESRSSLDYSSDSEQSSVQATQSAQEKEKQGQMERTHNKQEKNRGEEKSKSERECPHSKKRTLKENLSDHLRNGSKPKRKNYAGSKWDSESNSERDVTKNSKNDSHPSSDKEEGEATSDSESEVSEIHIKVKPTTKSSTNTSLPDDNGAWKSSKQRTSTSDSEGSCSNSENNRGKPQKHKHGSKENLKREHTKKVKEKLKGKKDKKHKAPKRKQAFHWQPPLEFGEEEEEEIDDKQVTQESKEKKVSENNETIKDNILKTEKSSEEDLSGKHDTVTVSSDLDQFTKDDSKLSISPTALNTEENVACLQNIQHVEESVPNGVEDVLQTDDNMEICTPDRSSPAKVEETSPLGNARLDTPDINIVLKQDMATEHPQAEVVKQESSMSESKVLGEVGKQDSSSASLASAGESTGKKEVAEKSQINLIDKKWKPLQGVGNLAAPNAATSSAVEVKVLTTVPEMKPQGLRIEIKSKNKVRPGSLFDEVRKTARLNRRPRNQESSSDEQTPSRDDDSQSRSPSRSRSKSETKSRHRTRSVSYSHSRSRSRSSTSSYRSRSYSRSRSRGWYSRGRTRSRSSSYRSYKSHRTSSRSRSRSSSYDPHSRSRSYTYDSYYSRSRSRSRSQRSDSYHRGRSYNRRSRSCRSYGSDSESDRSYSHHRSPSESSRYS

SEQ ID NO: 59 - DNA, 2693 bp, Human
ggaagctggagccacctgcggctctgagagggacagacggtgctcagcctgtgtcctggggcaaagctggattcattttcctccctggcgatcttctggggcccacagctggtgatatggaggcactgacaccctggtctcggcgcttgttttagaagaggcagaacagtgataaagacaaggatctaaatgggcaaggacgccctgccctcactgggctcactggcagccctgaccctctattctgcaccctgtgagccaccgagactgaaccaaacccaggaagcggcgccaccaaccagcctcgcagaggcagaggccctggagcagtgacagcacaggagatctgctggctcgggggaaggggaggaaagaggaaaacaaagggagtgatcgagtgagcctcgccccgccctccctgcgccggcccatgatgtgtcagtcagaggcgcggcaaggaccagagctccgcgcggcgaaatggttgcacttcccccagctggccctgaggcggaggctggggcagctgagctgcatgtccagacccgctctgaaactgcgctcctggcccttgaccgtcctctactacctcctgcccttcggcgccctcagaccgctcagccgggtgggatggaggcccgtaagcagggtggctttgtacaagtcagtgccaacgcgcttgctgtcacgggcctggggtcgcctcaatcaggtggagctgccacactggctgcgcaggcccgtctacagcctgtacatctggacgtttggggtgaacatgaaagaggccgctgtggaggacctgcatcactaccgcaacctcagcgagttcttccggcgcaagctgaagccgcaggcccggcctgtctgtggcctgcacagcgtgattagcccatcggatggaaggatcctcaactttgggcaggtgaagaactgtgaggtggagcaggtaaagggggtcacctactccctggagtcgttcctgggcccgcgtatgtgcacagaggacctgcccttcccaccagccgcgtcgtgtgactccttcaagaaccagctggtcacccgggaagggaatgagctctatcactgtgtcatctacctggcccctggggactaccactgcttccactcccccaccgactggactgtgtcccaccggcgccacttcccaggctccctgatgtcagtgaaccctggcatggctcgctggatcaaagagctcttctgccataacgagcgggtggtcctgacgggggactggaaacatggcttcttctcactgacagctgtgggggccaccaacgtgggctccattcgcatctactttgaccgggacctgcacacaaacagcccaaggcacagcaagggctcctacaatgacttcagcttcgtgacgcacaccaatagagagggcgtccccatgcgtaagggcgagcacctgggcgagttcaacctgggctccaccatcgtgctcatcttcgaggcccccaaggacttcaatttccagctgaaaacaggacagaaaatccgctttggggaagccctgggctcgctctagagtctctttcctgattatggctgctaagggatcttttccaaacagagtgagggtcttttcaagagggaggcccatgaggccatccaggtaagggcctgcctcagcgtggttgggagtctgaccaggtaggacttgaatgattcggctaccacctgttccagaggtgcagacaagaggtggcgagagcccccatcatgcccctcaacctatcccgttccttctgcctacaaataaaaagtgcaggctggaatgatctcagtcacatttggatctttttaaacactgtatagacggaagagcctgcattcctgaccgaaccttcagttggtctcggttgtcgttttttcttgctgctcctccccccatcacctgagctgttttctgttggccccttttgttttttggccttaacgctcctgctgcacagggtgaggtgcctccttggcacagactgtggatgcctctcccccagcagagccacacagccttcgtgacaactgctttccgttcccacattcacctcatcctgctctttagaaaaagcagtctttgtgcttgtggctgaacgcatcaccctggactctgctagtgtcttctgaggacactgatgacactgattaatgatacagacctttgcaggacctgatgagtgacccttctggagctggccaggtcctctgcagcaggcaagaccaatcaatcactgaacctgcctcatggcaccagagtgaacagggcaggcaggtagtaggcccagctggggaaatgggagagttcctgtccccctccacatatccctacatgaaatatgggaaagttgctgctattgattcagggtctgtcttggaggcagaggacccttggtggatagttggtcagtgcctggaaaacctgtcccagtttatcaggaacgcaggcctggggagcccccagtggcggggacagggccagatttcatgttgaccctggggatgctgtgaatttctcctgcaggagagacatcattgaattttttcaactgtatcagtagcacagtatttttgtatgaaaagtgggagacttctgaacagtaattcatttaattgcaaagcattttgaaataaaaaaaatcaaacttaaaaaaaaaaaaaaaaaa

SEQ ID NO: 60 - DNA, 1925 bp, Human
cctggttccttattccggtttgcagtccccccagcacttgggagtaatttgaccgacaatgtcatgatcacagtagatattattccttcaggttggaattcagctgatggtaaaagtgataaaactaaaagtgcgccttcaagagatccagaaagattgcagaaaataaaagagagcctccttttagaggactcagaagaagaagaaggtgacttatgtagaatttgtcaaatggcagctgcatcatcatctaatttgctgatagagccatgcaagtgcacaggaagtttgcagtatgtccaccaagactgtatgaaaaagtggttacaggccaaaattaactctggttcttcattagaagctgtaaccacctgtgaactatgtaaagagaagttggagcttaacctggaggattttgatattcatgaactacatagagctcatgcaaatgaacaagctgagtatgagtttatcagctctggtctctacctagtggtgttattgcacttgtgcgaacaaagcttttctgatatgatgggaaatacaaatgaaccaagcacacgtgtccgatttattaaccttgcaagaactcttcaggcacatatggaagatctcgaaacttcagaggatgattccgaagaagacggagaccataacaggacatttgatattgcctaacttcatataagacagatggatgatctgtgaacataagtgtttattaaaaatggcaattaaatataaattacttttgtgggggaatgcctaataaatacattgactatatataaaatgaatatatacatacacatgtatgcctgtatatatatattcattctccagtgttgctgaattaaaattctgctggactttttaacatagcaaatccgatgtttataaactggtaatcaaaaaggttttttcttttaggtgagtgggaaagtattacccttgttttaaatatctaagcaatgcctatcaacccttttttgtgttatgattactgtagtcatatttatgaaaaaaggtttgtgttttactcttgctagtgagaaaagtgggacaaaatatacttttgaaataaaatgctatatggcacctaattattttttcttttaaaatgccttaagttgcagtctcattttgataatcatttgcttccagtgtttaaaaattaaaaaaagaatggggagaaggttatgagaagagcattattaagtttccaaatttaatttgaattccaaattcacctagcaataaaatctaatttttaaaaagtatataaatataaaatgtataaatgatggatagatttttgtattgatttgcaaaatgcagattatatttgataggctatagtatgtagatattccttttaggaatattacagctgtaaattatatgagacttgccagtcaaatgctatttggtttaaaaaaattattgcaatctcaagttaatggaatatttttaaatcccacattcagagtttaaaacactggttttcaatgtgttttttagtgttgtcacttgtttatagataaatatataaataacctgtttggatcctggtcctttttaactgttccttggtaattctgagcatttatttgatgacttaatatttttcactacctttggagaacagatgaacattattcaccatgaatggatctatactgtgtggtcatgagttgtgtatacttccataacactgtatttttcttctgtcagtacccttaggatacactttaaaacaccttaaggtctgatgttatggcaacaaactactttttcaaacctaaataggaaccatgtaatttctcaaaagtgattgaacagtttgcccacacttagtttgttggtcttatgtaaaacattggctcaaaataaagtacacactgatttaaaaaaaaaaaaaaaaa

SEQ ID NO: 61 - DNA, 4673 bp, Human
tttgctcctgctcctccgctcctcctgcgcggggtgctgaaacagcccggggaagtagagccgcctccggggagcccaaccagccgaacgccgccggcgtcagcagccttgcgcggccacagcatgaccgctcgcggcctggcccttggcctcctcctgctgctactgtgtccagcgcaggtgttttcacagtcctgtgtttggtatggagagtgtggaattgcatatggggacaagaggtacaattgcgaatattctggcccaccaaaaccattgccaaaggatggatatgacttagtgcaggaactctgtccaggattcttctttggcaatgtcagtctctgttgtgatgttcggcagcttcagacactaaaagacaacctgcagctgcctctacagtttctgtccagatgtccatcctgtttttataacctactgaacctgttttgtgagctgacatgtagccctcgacagagtcagtttttgaatgttacagctactgaagattatgttgatcctgttacaaaccagacgaaaacaaatgtgaaagagttacaatactacgtcggacagagttttgccaatgcaatgtacaatgcctgccgggatgtggaggccccctcaagtaatgacaaggccctgggactcctgtgtgggaaggacgctgacgcctgtaatgccaccaactggattgaatacatgttcaataaggacaatggacaggcaccttttaccatcactcctgtgttttcagattttccagtccatgggatggagcccatgaacaatgccaccaaaggctgtgacgagtctgtggatgaggtcacagcaccatgtagctgccaagactgctctattgtctgtggccccaagccccagcccccacctcctcctgctccctggacgatccttggcttggacgccatgtatgtcatcatgtggatcacctacatggcgtttttgcttgtgttttttggagcattttttgcagtgtggtgctacagaaaacggtattttgtctccgagtacactcccatcgatagcaatatagctttttctgttaatgcaagtgacaaaggagaggcgtcctgctgtgaccctgtcagcgcagcatttgagggctgcttgaggcggctgttcacacgctgggggtctttctgcgtccgaaaccctggctgtgtcattttcttctcgctggtcttcattactgcgtgttcgtcaggcctggtgtttgtccgggtcacaaccaatccagttgacctctggtcagcccccagcagccaggctcgcctggaaaaagagtactttgaccagcactttgggcctttcttccggacggagcagctcatcatccgggcccctctcactgacaaacacatttaccagccatacccttcgggagctgatgtaccctttggacctccgcttgacatacagatactgcaccaggttcttgacttacaaatagccatcgaaaacattactgcctcttatgacaatgagactgtgacacttcaagacatctgcttggcccctctttcaccgtataacacgaactgcaccattttgagtgtgttaaattacttccagaacagccattccgtgctggaccacaagaaaggggacgacttctttgtgtatgccgattaccacacgcactttctgtactgcgtacgggctcctgcctctctgaatgatacaagtttgctccatgacccttgtctgggtacgtttggtggaccagtgttcccgtggcttgtgttgggaggctatgatgatcaaaactacaataacgccactgcccttgtgattaccttccctgtcaataattactataatgatacagagaagctccagagggcccaggcctgggaaaaagagtttattaattttgtgaaaaactacaagaatcccaatctgaccatttccttcactgctgaacgaagtattgaagatgaactaaatcgtgaaagtgacagtgatgtcttcaccgttgtaattagctatgccatcatgtttctatatatttccctagccttggggcacatcaaaagctgtcgcaggcttctggtggattcgaaggtctcactaggcatcgcgggcatcttgatcgtgctgagctcggtggcttgctccttgggtgtcttcagctacattgggttgcccttgaccctcattgtgattgaagtcatcccgttcctggtgctggctgttggagtggacaacatcttcattctggtgcaggcctaccagagagatgaacgtcttcaaggggaaaccctggatcagcagctgggcagggtcctaggagaagtggctcccagtatgttcctgtcatccttttctgagactgtagcatttttcttaggagcattgtccgtgatgccagccgtgcacaccttctctctctttgcgggattggcagtcttcattgactttcttctgcagattacctgtttcgtgagtctcttggggttagacattaaacgtcaagagaaaaatcggctagacatcttttgctgtgtcagaggtgctgaagatggaacaagcgtccaggcctcagagagctgtttgtttcgcttcttcaaaaactcctattctccacttctgctaaaggactggatgagaccaattgtgatagcaatatttgtgggtgttctgtcattcagcatcgcagtcctgaacaaagtagatattggattggatcagtctctttcgatgccagatgactcctacatggtggattatttcaaatccatcagtcagtacctgcatgcgggtccgcctgtgtactttgtcctggaggaagggcacgactacacttcttccaaggggcagaacatggtgtgcggcggcatgggctgcaacaatgattccctggtgcagcagatatttaacgcggcgcagctggacaactatacccgaataggcttcgccccctcgtcctggatcgacgattatttcgactgggtgaagccacagtcgtcttgctgtcgagtggacaatatcactgaccagttctgcaatgcttcagtggttgaccctgcctgcgttcgctgcaggcctctgactccggaaggcaaacagaggcctcaggggggagacttcatgagattcctgcccatgttcctttcggataaccctaaccccaagtgtggcaaagggggacatgctgcctatagttctgcagttaacatcctccttggccatggcaccagggtcggagccacgtacttcatgacctaccacaccgtgctgcagacctctgctgactttattgacgctctgaagaaagcccgacttatagccagtaatgtcaccgaaaccatgggcattaacggcagtgcctaccgagtatttccttacagtgtgttttatgtcttctacgaacagtacctgaccatcattgacgacactatcttcaacctcggtgtgtccctgggcgcgatatttctggtgaccatggtcctcctgggctgtgagctctggtctgcagtcatcatgtgtgccaccatcgccatggtcttggtcaacatgtttggagttatgtggctctggggcatcagtctgaacgctgtatccttggtcaacctggtgatgagctgtggcatctccgtggagttctgcagccacataaccagagcgttcacggtgagcatgaaaggcagccgcgtggagcgcgcggaagaggcacttgcccacatgggcagctccgtgttcagtggaatcacacttacaaaatttggagggattgtggtgttggcttttgccaaatctcaaattttccagatattctacttcaggatgtatttggccatggtcttactgggagccactcacggattaatatttctccctgtcttactcagttacatagggccatcagtaaataaagccaaaagttgtgccactgaagagcgatacaaaggaacagagcgcgaacggcttctaaatttctagccctctcgcagggcatcctgactgaactgtgtctaagggtcggtcggtttaccactggacgggtgctgcatcggcaaggccaagttgaacaccggatggtgccaaccatcggttgtttggcagcagctttgaacgtagcgcctgtgaactcaggaatgcacagttgacttgggaagcagtattactagatctggaggcaaccacaggacactaaacttctcccagcctcttcaggaaagaaacctcattctttggcaagcaggaggtgacactagatggctgtgaatgtgatccgctcactgacactctgtaaaggccaatcaatgcactgtctgtcctctcctttttaggagtaagccatcccacaagttctataccatatttttagtgacagttgaggttgtagatacactttataacattttatagtttaaagagctttattaatgcaataaattaactttgtacacatttttatataaaaaaacagcaagtgatttcagaatgttgtaggcctcattagagcttggtctccaaaaatctgtttgaaaaaagcaacatgttcttcacagtgttcccctagaaaggaagagatttaattgccagttagatgtggcatgaaatgagggacaaagaaagcatctcgtaggtgtgtctactgggttttaacttatttttctttaataaaatacattgttttcctaaaaaaaaaa

SEQ ID NO: 62 - protein, 1278 aa, Human
MTARGLALGLLLLLLCPAQVFSQSCVWYGECGIAYGDKRYNCEYSGPPKPLPKDGYDLVQELCPGFFFGNVSLCCDVRQLQTLKDNLQLPLQFLSRCPSCFYNLLNLFCELTCSPRQSQFLNVTATEDYVDPVTNQTKTNVKELQYYVGQSFANAMYNACRDVEAPSSNDKALGLLCGKDADACNATNWIEYMFNKDNGQAPFTITPVFSDFPVHGMEPMNNATKGCDESVDEVTAPCSCQDCSIVCGPKPQPPPPPAPWTILGLDAMYVIMWITYMAFLLVFFGAFFAVWCYRKRYFVSEYTPIDSNIAFSVNASDKGEASCCDPVSAAFEGCLRRLFTRWGSFCVRNPGCVIFFSLVFITACSSGLVFVRVTTNPVDLWSAPSSQARLEKEYFDQHFGPFFRTEQLIIRAPLTDKHIYQPYPSGADVPFGPPLDIQILHQVLDLQIAIENITASYDNETVTLQDICLAPLSPYNTNCTILSVLNYFQNSHSVLDHKKGDDFFVYADYHTHFLYCVRAPASLNDTSLLHDPCLGTFGGPVFPWLVLGGYDDQNYNNATALVITFPVNNYYNDTEKLQRAQAWEKEFINFVKNYKNPNLTISFTAERSIEDELNRESDSDVFTVVISYAIMFLYISLALGHIKSCRRLLVDSKVSLGIAGILIVLSSVACSLGVFSYIGLPLTLIVIEVIPFLVLAVGVDNIFILVQAYQRDERLQGETLDQQLGRVLGEVAPSMFLSSFSETVAFFLGALSVMPAVHTFSLFAGLAVFIDFLLQITCFVSLLGLDIKRQEKNRLDIFCCVRGAEDGTSVQASESCLFRFFKNSYSPLLLKDWMRPIVIAIFVGVLSFSIAVLNKVDIGLDQSLSMPDDSYMVDYFKSISQYLHAGPPVYFVLEEGHDYTSSKGQNMVCGGMGCNNDSLVQQIFNAAQLDNYTRIGFAPSSWIDDYFDWVKPQSSCCRVDNITDQFCNASVVDPACVRCRPLTPEGKQRPQGGDFMRFLPMFLSDNPNPKCGKGGHAAYSSAVNILLGHGTRVGATYFMTYHTVLQTSADFIDALKKARLIASNVTETMGINGSAYRVFPYSVFYVFYEQYLTIIDDTIFNLGVSLGAIFLVTMVLLGCELWSAVIMCATIAMVLVNMFGVMWLWGISLNAVSLVNLVMSCGISVEFCSHITRAFTVSMKGSRVERAEEALAHMGSSVFSGITLTKFGGIVVLAFAKSQIFQIFYFRMYLAMVLLGATHGLIFLPVLLSYIGPSVNKAKSCATEERYKGTERERLLNF

SEQ ID NO: 63 - DNA, 3318 bp, Human
gtgatgcgtagttccggctgccggttgacatgaagaagcagcagcggctagggcggcggtagctgcaggggtcggggattgcagcgggcctcggggctaagagcgcgacgcggcctagagcggcagacggcgcagtgggccgagaaggaggcgcagcagccgccctggcccgtcatggagatggaaaaggagttcgagcagatcgacaagtccgggagctgggcggccatttaccaggatatccgacatgaagccagtgacttcccatgtagagtggccaagcttcctaagaacaaaaaccgaaataggtacagagacgtcagtccctttgaccatagtcggattaaactacatcaagaagataatgactatatcaacgctagtttgataaaaatggaagaagcccaaaggagttacattcttacccagggccctttgcctaacacatgcggtcacttttgggagatggtgtgggagcagaaaagcaggggtgtcgtcatgctcaacagagtgatggagaaaggttcgttaaaatgcgcacaatactggccacaaaaagaagaaaaagagatgatctttgaagacacaaatttgaaattaacattgatctctgaagatatcaagtcatattatacagtgcgacagctagaattggaaaaccttacaacccaagaaactcgagagatcttacatttccactataccacatggcctgactttggagtccctgaatcaccagcctcattcttgaactttcttttcaaagtccgagagtcagggtcactcagcccggagcacgggcccgttgtggtgcactgcagtgcaggcatcggcaggtctggaaccttctgtctggctgatacctgcctcttgctgatggacaagaggaaagacccttcttccgttgatatcaagaaagtgctgttagaaatgaggaagtttcggatggggctgatccagacagccgaccagctgcgcttctcctacctggctgtgatcgaaggtgccaaattcatcatgggggactcttccgtgcaggatcagtggaaggagctttcccacgaggacctggagcccccacccgagcatatccccccacctccccggccacccaaacgaatcctggagccacacaatgggaaatgcagggagttcttcccaaatcaccagtgggtgaaggaagagacccaggaggataaagactgccccatcaaggaagaaaaaggaagccccttaaatgccgcaccctacggcatcgaaagcatgagtcaagacactgaagttagaagtcgggtcgtggggggaagtcttcgaggtgcccaggctgcctccccagccaaaggggagccgtcactgcccgagaaggacgaggaccatgcactgagttactggaagcccttcctggtcaacatgtgcgtggctacggtcctcacggccggcgcttacctctgctacaggttcctgttcaacagcaacacatagcctgaccctcctccactccacctccacccactgtccgcctctgcccgcagagcccacgcccgactagcaggcatgccgcggtaggtaagggccgccggaccgcgtagagagccgggccccggacggacgttggttctgcactaaaacccatcttccccggatgtgtgtctcacccctcatccttttactttttgccccttccactttgagtaccaaatccacaagccattttttgaggagagtgaaagagagtaccatgctggcggcgcagagggaaggggcctacacccgtcttggggctcgccccacccagggctccctcctggagcatcccaggcgggcggcacgccaacagccccccccttgaatctgcagggagcaactctccactccatatttatttaaacaattttttccccaaaggcatccatagtgcactagcattttcttgaaccaataatgtattaaaattttttgatgtcagccttgcatcaagggctttatcaaaaagtacaataataaatcctcaggtagtactgggaatggaaggctttgccatgggcctgctgcgtcagaccagtactgggaaggaggacggttgtaagcagttgttatttagtgatattgtgggtaacgtgagaagatagaacaatgctataatatataatgaacacgtgggtatttaataagaaacatgatgtgagattactttgtcccgcttattctcctccctgttatctgctagatctagttctcaatcactgctcccccgtgtgtattagaatgcatgtaaggtcttcttgtgtcctgatgaaaaatatgtgcttgaaatgagaaactttgatctctgcttactaatgtgccccatgtccaagtccaacctgcctgtgcatgacctgatcattacatggctgtggttcctaagcctgttgctgaagtcattgtcgctcagcaatagggtgcagttttccaggaataggcatttgcctaattcctggcatgacactctagtgacttcctggtgaggcccagcctgtcctggtacagcagggtcttgctgtaactcagacattccaagggtatgggaagccatattcacacctcacgctctggacatgatttagggaagcagggacaccccccgccccccacctttgggatcagcctccgccattccaagtcaacactcttcttgagcagaccgtgatttggaagagaggcacctgctggaaaccacacttcttgaaacagcctgggtgacggtcctttaggcagcctgccgccgtctctgtcccggttcaccttgccgagagaggcgcgtctgccccaccctcaaaccctgtggggcctgatggtgctcacgactcttcctgcaaagggaactgaagacctccacattaagtggctttttaacatgaaaaacacggcagctgtagctcccgagctactctcttgccagcattttcacattttgcctttctcgtggtagaagccagtacagagaaattctgtggtgggaacattcgaggtgtcaccctgcagagctatggtgaggtgtggataaggcttaggtgccaggctgtaagcattctgagctgggcttgttgtttttaagtcctgtatatgtatgtagtagtttgggtgtgtatatatagtagcatttcaaaatggacgtactggtttaacctcctatccttggagagcagctggctctccaccttgttacacattatgttagagaggtagcgagctgctctgctatatgccttaagccaatatttactcatcaggtcattattttttacaatggccatggaataaaccatttttacaaaa

SEQ ID NO: 64 - protein, 435 aa, Human
MEMEKEFEQIDKSGSWAAIYQDIRHEASDFPCRVAKLPKNKNRNRYRDVSPFDHSRIKLHQEDNDYINASLIKMEEAQRSYILTQGPLPNTCGHFWEMVWEQKSRGVVMLNRVMEKGSLKCAQYWPQKEEKEMIFEDTNLKLTLISEDIKSYYTVRQLELENLTTQETREILHFHYTTWPDFGVPESPASFLNFLFKVRESGSLSPEHGPVVVHCSAGIGRSGTFCLADTCLLLMDKRKDPSSVDIKKVLLEMRKFRMGLIQTADQLRFSYLAVIEGAKFIMGDSSVQDQWKELSHEDLEPPPEHIPPPPRPPKRILEPHNGKCREFFPNHQWVKEETQEDKDCPIKEEKGSPLNAAPYGIESMSQDTEVRSRVVGGSLRGAQAASPAKGEPSLPEKDEDHALSYWKPFLVNMCVATVLTAGAYLCYRFLFNSNT

SEQ ID NO: 65 - DNA, 2366 bp, Human
ggcacgagcgagggagccggaaagatggtggttaccagatctgcacgggctaaggccagcatccaagccgcgtcggctgaaagttccgggcaaaagagttttgctgctaatgggattcaagcgcatccagaaagtagtactggatctgatgcccgaactactgatgaatcacagaccactgggaagcaaagtttaatccctagaactcctaaagctagaaagagtaagagcagaactacaggctcactaccaaaggggactgaaccatctacggatggagagacctctgaggcagagtcaaattattctgtgtctgagcaccatgataccattttaagggtaactaggagaaggcagatcttaattgcatgctccccagtgtccagtgttaggaaaaagccgaaagtaactccaacaaaggagtcttacactgaagaaatagtgtctgaagcagaatctcatgtttcaggtatttctagaattgtgcttcctacagaaaaaactacaggagccagaagaagtaaggctaaatctctgacagatccaagccaagaatctcatacagaagctatatctgatgctgagacatcaagctcagacatttcattctctggaattgcaactagaagaaccaggagtatgcagaggaaattaaaggcacaaactgaaaagaaagatagtaagattgtaccaggaaatgagaaacagatcgtgggtacacctgtgaattcagaggattcagataccagacaaacttcccatttacaagcaagatctctttctgagataaataagccaaatttctataataatgactttgatgatgatttctcccacagaagttcagaaaatatattaacagtgcacgaacaggccaatgttgaatctcttaaagaaacaaaacagaattgtaaggatttggatgaagatgccaatggaataacagatgaggggaaagaaattaatgagaaaagttctcagctgaagaatctttctgaacttcaggacactagccttcaacagttagtttctcagagacattcaaccccccaaaataaaaatgctgtatcagtgcactctaatctgaactctgaggctgtaatgaaatcattaactcaaacatttgcaactgtggaagtaggcagatggaataacaacaaaaagagccccataaaagcaagtgacttgacaaagtttggtgattgtggtggtagtgatgatgaagaagagtccacagttataagtgtcagtgaagacatgaacagtgaagggaatgtagattttgaatgtgataccaaactatacacgtctgcgcccaacacatctcagggtaaagataattctgtcttactagttctcagcagtgatgaaagccaacagtctgaaaacagtgagaatgaagaggatactttatgttttgttgaaaatagtggccaaagggagtcattaagtggagacacaggaagtctgtcatgtgacaatgcattgtttgtaattgacacaactcctggaatgagtgctgataaaaatttttacttggaagaggaagacaaggcaagtgaggttgccattgaggaagaaaaagaagaggaagaggatgaaaaaagtgaagaagattcatcagaccatgacgaaaatgaagatgagtttagtgatgaagaagacttcctaaatagcacaaaggctaaacttctgaagttgacaagcagcagcatagaccctggtctgagtatcaagcagttgggtggtttgtatattaattttaatgcagataaactacagtctaacaagagaaccctaacacagatcaaggagaaaaagaaaaatgagcttctgcagaaagccgtcattacacctgattttgaaaaaaaccactgtgttccaccatatagtgaatcaaagtatcaacttcagaaaaaacgcagaaaagaacgacaaaaaacagcaggggatggctggtttggtatgaaagctccagaaatgacaaatgaactgaaaaatgatctcaaagcactgaagatgagagccagcatggacccgaaaagattttacaagaaaaatgatagagatggcttccccaagtacttccagattggaaccattgttgacaatccagctgatttctaccattcacgaattcccaagaagcaaaggaaaagaactattgtggaagactgctggctgattctgaattcagagatacaaccgaaggaagtactcagagatcatggctgaaaaagcagcaaatgcagcaggaaaaaagttccgaaagaagaagaaatttcgcaattaagatttaccaagcaaactgcaacattttacattgctcctttatttacttattaaagacgtttggaaaactaaaa

SEQ ID NO: 66 - protein, 736 aa, Human
MVVTRSARAKASIQAASAESSGQKSFAANGIQAHPESSTGSDARTTDESQTTGKQSLIPRTPKARKSKSRTTGSLPKGTEPSTDGETSEAESNYSVSEHHDTILRVTRRRQILIACSPVSSVRKKPKVTPTKESYTEEIVSEAESHVSGISRIVLPTEKTTGARRSKAKSLTDPSQESHTEAISDAETSSSDISFSGIATRRTRSMQRKLKAQTEKKDSKIVPGNEKQIVGTPVNSEDSDTRQTSHLQARSLSEINKPNFYNNDFDDDFSHRSSENILTVHEQANVESLKETKQNCKDLDEDANGITDEGKEINEKSSQLKNLSELQDTSLQQLVSQRHSTPQNKNAVSVHSNLNSEAVMKSLTQTFATVEVGRWNNNKKSPIKASDLTKFGDCGGSDDEEESTVISVSEDMNSEGNVDFECDTKLYTSAPNTSQGKDNSVLLVLSSDESQQSENSENEEDTLCFVENSGQRESLSGDTGSLSCDNALFVIDTTPGMSADKNFYLEEEDKASEVAIEEEKEEEEDEKSEEDSSDHDENEDEFSDEEDFLNSTKAKLLKLTSSSIDPGLSIKQLGGLYINFNADKLQSNKRTLTQIKEKKKNELLQKAVITPDFEKNHCVPPYSESKYQLQKKRRKERQKTAGDGWFGMKAPEMTNELKNDLKALKMRASMDPKRFYKKNDRDGFPKYFQIGTIVDNPADFYHSRIPKKQRKRTIVEDCWLILNSEIQPKEVLRDHG

SEQ ID NO: 67 - DNA, 2776 bp, Human
cagggcagactggtagcaaagcccccacgcccagccaggagcaccgccgcggactccagcacaccgagggacatgctgggcctgcgccccccactgctcgccctggtggggctgctctccctcgggtgcgtcctctctcaggagtgcacgaagttcaaggtcagcagctgccgggaatgcatcgagtcggggcccggctgcacctggtgccagaagctgaacttcacagggccgggggatcctgactccattcgctgcgacacccggccacagctgctcatgaggggctgtgcggctgacgacatcatggaccccacaagcctcgctgaaacccaggaagaccacaatgggggccagaagcagctgtccccacaaaaagtgacgctttacctgcgaccaggccaggcagcagcgttcaacgtgaccttccggcgggccaagggctaccccatcgacctgtactatctgatggacctctcctactccatgcttgatgacctcaggaatgtcaagaagctaggtggcgacctgctccgggccctcaacgagatcaccgagtccggccgcattggcttcgggtccttcgtggacaagaccgtgctgccgttcgtgaacacgcaccctgataagctgcgaaacccatgccccaacaaggagaaagagtgccagcccccgtttgccttcaggcacgtgctgaagctgaccaacaactccaaccagtttcagaccgaggtcgggaagcagctgatttccggaaacctggatgcacccgagggtgggctggacgccatgatgcaggtcgccgcctgcccggaggaaatcggctggcgcaacgtcacgcggctgctggtgtttgccactgatgacggcttccatttcgcgggcgacggaaagctgggcgccatcctgacccccaacgacggccgctgtcacctggaggacaacttgtacaagaggagcaacgaattcgactacccatcggtgggccagctggcgcacaagctggctgaaaacaacatccagcccatcttcgcggtgaccagtaggatggtgaagacctacgagaaactcaccgagatcatccccaagtcagccgtgggggagctgtctgaggactccagcaatgtggtccatctcattaagaatgcttacaataaactctcctccagggtcttcctggatcacaacgccctccccgacaccctgaaagtcacctacgactccttctgcagcaatggagtgacgcacaggaaccagcccagaggtgactgtgatggcgtgcagatcaatgtcccgatcaccttccaggtgaaggtcacggccacagagtgcatccaggagcagtcgtttgtcatccgggcgctgggcttcacggacatagtgaccgtgcaggttcttccccagtgtgagtgccggtgccgggaccagagcagagaccgcagcctctgccatggcaagggcttcttggagtgcggcatctgcaggtgtgacactggctacattgggaaaaactgtgagtgccagacacagggccggagcagccaggagctggaaggaagctgccggaaggacaacaactccatcatctgctcagggctgggggactgtgtctgcgggcagtgcctgtgccacaccagcgacgtccccggcaagctgatatacgggcagtactgcgagtgtgacaccatcaactgtgagcgctacaacggccaggtctgcggcggcccggggagggggctctgcttctgcgggaagtgccgctgccacccgggctttgagggctcagcgtgccagtgcgagaggaccactgagggctgcctgaacccgcggcgtgttgagtgtagtggtcgtggccggtgccgctgcaacgtatgcgagtgccattcaggctaccagctgcctctgtgccaggagtgccccggctgcccctcaccctgtggcaagtacatctcctgcgccgagtgcctgaagttcgaaaagggcccctttgggaagaactgcagcgcggcgtgtccgggcctgcagctgtcgaacaaccccgtgaagggcaggacctgcaaggagagggactcagagggctgctgggtggcctacacgctggagcagcaggacgggatggaccgctacctcatctatgtggatgagagccgagagtgtgtggcaggccccaacatcgccgccatcgtcgggggcaccgtggcaggcatcgtgctgatcggcattctcctgctggtcatctggaaggctctgatccacctgagcgacctccgggagtacaggcgctttgagaaggagaagctcaagtcccagtggaacaatgataatccccttttcaagagcgccaccacgacggtcatgaaccccaagtttgctgagagttaggagcacttggtgaagacaaggccgtcaggacccaccatgtctgccccatcacgcggccgagacatggcttggccacagctcttgaggatgtcaccaattaaccagaaatccagttattttccgccctcaaaatgacagccatggccggccggtgcttctgggggctcgtcggggggacagctccactctgactggcacagtctttgcatggagacttgaggagggcttgaggttggtgaggttaggtgcgtgtttcctgtgcaagtcaggacatcagtctgattaaaggtggtgccaatttatttacatttaaacttgtcagggtataaaatgacatcccattaattatattgttaatcaatcacgtgtatagaaaaaaaaataaaacttcaat

SEQ ID NO: 68 - protein, 769 aa, Human
MLGLRPPLLALVGLLSLGCVLSQECTKFKVSSCRECIESGPGCTWCQKLNFTGPGDPDSIRCDTRPQLLMRGCAADDIMDPTSLAETQEDHNGGQKQLSPQKVTLYLRPGQAAAFNVTFRRAKGYPIDLYYLMDLSYSMLDDLRNVKKLGGDLLRALNEITESGRIGFGSFVDKTVLPFVNTHPDKLRNPCPNKEKECQPPFAFRHVLKLTNNSNQFQTEVGKQLISGNLDAPEGGLDAMMQVAACPEEIGWRNVTRLLVFATDDGFHFAGDGKLGAILTPNDGRCHLEDNLYKRSNEFDYPSVGQLAHKLAENNIQPIFAVTSRMVKTYEKLTEIIPKSAVGELSEDSSNVVHLIKNAYNKLSSRVFLDHNALPDTLKVTYDSFCSNGVTHRNQPRGDCDGVQINVPITFQVKVTATECIQEQSFVIRALGFTDIVTVQVLPQCECRCRDQSRDRSLCHGKGFLECGICRCDTGYIGKNCECQTQGRSSQELEGSCRKDNNSIICSGLGDCVCGQCLCHTSDVPGKLIYGQYCECDTINCERYNGQVCGGPGRGLCFCGKCRCHPGFEGSACQCERTTEGCLNPRRVECSGRGRCRCNVCECHSGYQLPLCQECPGCPSPCGKYISCAECLKFEKGPFGKNCSAACPGLQLSNNPVKGRTCKERDSEGCWVAYTLEQQDGMDRYLIYVDESRECVAGPNIAAIVGGTVAGIVLIGILLLVIWKALIHLSDLREYRRFEKEKLKSQWNNDNPLFKSATTTVMNPKFAES

SEQ ID NO: 69 - DNA, 3598 bp, Human
cgcttcggtagcataagtgcggtgggagggggctctgcggttttggggacccagggcgggaacccggacccggctggaagtccggagcctgccgcagccccgcccctccgctctttcttggtgaccttaagccagtggctgcctttttctgagcccgggcggggccgaaggcgcccgtaggccctcgggactcccagcactgcagagggtgtgaggtctgacatccaagacacgttgtttcgtatttctgaaggaagaactcaagctccgggaagtgatggctggggatggggcgggcaacttggggaccgagtgtacgatccacgcctaaggttgagggcggccgagctagccaggcagccgtgaccccagtgcttttcagacgtttcttagcttccagagcccaacacatacagctgatacacgcagaccagatctggtcaggtcctcggaagctgagtccagagcgatgctgctgaagacagtgctcttgctgggacatgtggcccaggtgctgatgctggacaatgggctcctgcagacaccacccatgggctggctggcctgggaacgcttccgctgcaacattaactgtgatgaggacccaaagaactgcataagtgaacagctcttcatggagatggctgaccggatggcacaggatggatggcgggacatgggctacacatacctaaacattgatgactgctggatcggcggtcgcgatgccagtggccgcctgatgccagatcccaagcgcttccctcatggcattcctttcctggctgactacgttcactccctgggcctgaagttgggtatctacgcggacatgggcaacttcacctgcatgggttacccaggcaccacactggacaaggtggtccaggatgctcagaccttcgccgagtggaaggtagacatgctcaagctggatggctgcttctccacccccgaggagcgggcccaggggtaccccaagatggctgctgccctgaatgccacaggccgccccatcgccttctcctgcagctggccagcctatgaaggcggcctccccccaagggtgaactacagtctgctggcggacatctgcaacctctggcgtaactatgatgacatccaggactcctggtggagcgtgctctccatcctgaattggttcgtggagcaccaggacatactgcagccagtggccggccctgggcactggaatgaccctgacatgctgctcattgggaactttggtctcagcttagagcaatcccgggcccagatggccctgtggacggtgctggcagcccccctcttgatgtccacagacctgcgtaccatctccgcccagaacatggacattctgcagaatccactcatgatcaaaatcaaccaggatcccttaggcatccagggacgcaggattcacaaggaaaaatctctcatcgaagtgtacatgcggcctctgtccaacaaggctagcgccttagtcttcttcagctgcaggaccgatatgccttatcgctaccactcctcccttggccagctgaacttcaccgggtctgtgatatatgaggcccaggacgtctactcaggtgacatcatcagtggcctccgagatgaaaccaacttcacagtgatcatcaacccttcaggggtagtgatgtggtacctgtatcccatcaagaacctggagatgtcccagcagtgaggagctgggacatgtgacaggctgtggtggcaccactgagcctagaccatggagccttggcatgcccagggcaagtggggaggttctctgctccccaggcctgctcggtgactgaccccatcatacccaaagtgcaatctcacggccaggttctatgccctgtccaagcgtaaaccctcttggaaacttcttttggggcaattttcctgtggccttcctggcctctacttccatgtgcgcagccccacagacgttgctgagcaactcgccagcctcctgagctccatgcccatcaggactctagcctctgaccttgctgttgactctgaaatcaggatttggaagttttcgaattaggagtagagagatctgacctcttgccaggaatgcccatggatcatgtgattggcttttctacccatagagggccttgcagcctgataccactgggagtgagggtcacaaaggagaccttggctccctcaggtcaccaataaacctgttctttaatcaagtagttgtaatatggacctggggtacctttagttagggactctggtggcactacacggggtgctggattcaaatctcacctctatggatgatgtctggcatcgtctggcccctccttttccaaagtgaccagaagattgtacttcctagagatgccagacttgcctcacacccaggagctgcccctgctgtgcctggtatgctggcagtggtgatggtgacaacacaatgaggccaagtagcaatgctcccaggtcctgcagcttgtgctctgcccagcagtcccctggccagcacctcagcctgctcttctctctggtggctccaccccaacccctacttcttttcctttatttctctcccaacctggctgcaaaggaggttcatatccccagatgtgtccacaaacctgtccaggagttgtgtcttaaaattgatttcctgtccctcttcctaaggacaggggtaacagtcaaagtgaaggaatgatgggttcttgcctgtcttgctttggtccgtatttcccaagccctcctcttttagccaaggctacagggcacttgtcttccctggtggctctcccctttggagagagctagtggcagagaacctagctaggtctccttgggctttgaatgcaggagcacccagtgccccaggccttgcactgtgctgcccaaggagtattttctgggtggatctcccatactcctcagggttctgaggtccttgtatttagggtatggtgtaaaaacttacatatgcacattttgttacatcatttaagatgattgaagctttactggttaagtacagggtcaccagagaaagttcctttccccagttgatgtcttgaggctgttgagaaacttaggacagaagcctacctcatcccaggcctgcccctccgtgcatagctctgcctttgggtcttgttcatagtgctgttcaggcaaaatggaatagtctcaggagggaacaccttctcttgctagctccaggaaggctttgtgggaaatgagttgagaccatggacttgggagttgggggccagagttgagcctggacttgaccaattaattcccttacctttcagcccaagatagctacatgtctttacttgctgtataagttttccttttgtcctgggggtgcctgattgatcctatctcttcacccttcattctttcaacaaacatgccatctatctcccaggacatttattcccttctattcaaggccagttaggaatgcaattattttttttttcagttaaatacagacttgtttggacgcaaggtaccctttctctttttaaaaactttttatcatgaaaactttcaaatacaaaaataaaatggtagagagtgaacctccatg

SEQ ID NO: 70 - protein, 411 aa, Human
MLLKTVLLLGHVAQVLMLDNGLLQTPPMGWLAWERFRCNINCDEDPKNCISEQLFMEMADRMAQDGWRDMGYTYLNIDDCWIGGRDASGRLMPDPKRFPHGIPFLADYVHSLGLKLGIYADMGNFTCMGYPGTTLDKVVQDAQTFAEWKVDMLKLDGCFSTPEERAQGYPKMAAALNATGRPIAFSCSWPAYEGGLPPRVNYSLLADICNLWRNYDDIQDSWWSVLSILNWFVEHQDILQPVAGPGHWNDPDMLLIGNFGLSLEQSRAQMALWTVLAAPLLMSTDLRTISAQNMDILQNPLMIKINQDPLGIQGRRIHKEKSLIEVYMRPLSNKASALVFFSCRTDMPYRYHSSLGQLNFTGSVIYEAQDVYSGDIISGLRDETNFTVIINPSGVVMWYLYPIKNLEMSQQ

SEQ ID NO: 71 - DNA, 2029 bp, Human
gtggacgcgaggagccgggcgcttagaacagaggcttgcacaggtggagatgtggaagtctgtagtgggccatgatgtgtctgtttccgtggagacccagggtgatgattgggacacagatcctgactttgtgaatgacatctctgaaaaggagcaacgatggggagccaagaccatcgaggggtctggacgcacagaacacatcaacatccaccagctgaggaacaaagtatcagaggagcatgatgttctcaggaagaaagagatggagtcagggcccaaagcatcccatggctatggaggtcggtttggagtagaaagagaccgaatggacaagagtgcagtgggccatgagtatgttgccgaggtggagaagcactcttctcagacggatgctgccaaaggctttgggggcaagtacggagttgagagggacagggcagacaagtcagcagtcggctttgattataaaggagaagtggagaagcatacatctcagaaagattactctcgtggctttggtggccggtacggggtggagaaggataaatgggacaaagcagctctgggatatgactacaagggagagacggagaaacacgagtcccagagagattatgccaagggctttggtggccagtatggaatccagaaggaccgagtggataagagcgctgtcggcttcaatgaaatggaggccccgaccacagcttataagaagacgacgcccatagaagccgcttctagtggtgcccgtgggctgaaggcgaaatttgagtccatggctgaggagaagaggaagcgagaggaagaggagaaggcacagcaggtggccaggaggcaacaggagcgaaaggctgtgacaaagaggagccctgaggctccacagccagtgatagctatggaagagccagcagtaccggccccactgcccaagaaaatctcctcagaggcctggcctccagttgggactcctccatcatcagagtctgagcctgtgagaaccagcagggaacacccagtgcccttgctgcccattaggcagactctcccggaggacaatgaggagcccccagctctgccccctaggactctggaaggcctccaggtggaggaagagccagtgtacgaagcagagcctgagcctgagcccgagcctgagcccgagcctgagaatgactatgaggacgttgaggagatggacaggcatgagcaggaggatgaaccagagggggactatgaggaggtgctcgagcctgaagattcttctttttcttctgctctggctggatcatcaggctgcccggctggggctggggctggggctgtggctctggggatctcagctgtggctctatatgattaccaaggagagggaagtgatgagctttcctttgatccggacgacgtaatcactgacattgagatggtggacgagggctggtggcggggacgttgccatggccactttggactcttccctgcaaattatgtcaagcttctggagtgactagagctcactgtctactgcaactgtgatttcccatgtccaaagtggctctgcctccaccccctccctattcctgatgcaaatgtctaaccagatgagtttctggacagacttccctctcctgcttcattaagggcttggggcagagacagcatggggaaggaggtccccttccccaagagtcctctctatcctggatgagctcatgaacatttctcttgtgttcctgactccttcccaatgaacacctctctgccaccccaagctctgctctcctcctctgtgagctctgggcttcccagtttgtttacccgggaaagtacgtctagattgtgtggtttgcctcattgtgctatttgcccactttccttccctgaagaaatatctgtgaaccttctttctgttcagtcctaaaattcgaaataaagtgagactatggttcacctgtaaaaaaaaaaaaaaaaaaaaaaaaaaaaaaaaaaaaaaaaaaaaaaaaaaaaaaaaaaaaaaaaaaaaaaa

SEQ ID NO: 72 - protein, 486 aa, Human [sequence omitted]

SEQ ID NO: 73 - DNA, 1309 bp, Human
cgcagctggagcctgcggctgaggctcgggcgcgctcaggcccggatcctggcggcctgggcggccgcaccatggactcgggaaccgaggagtacgagctcaacggcggcctgcctccgggcacacccggctccccggacgcctcgccggcccgctggggctggaggcacgggcccatcaacgtgaaccattacgccagcaagaagagcgcagccgagagcatgctggacatcgcgctgctgatggccaacgcgtcccagctgaaggccgtcgtggaacagggccccagcttcgccttctatgtgcccctggtggtcctcatctccatctcccttgtgctgcagatcggcgtgggggtgctgctcatcttccttgtcaagtacgaccttaacaacccggacaagcacgccaagctggacttcctcaacaacctggccacgggcctggtgttcatcatcgtggtagtcaacatcttcatcacggccttcggggtccagaagcccttgatggacatggcaccccagcagtaggacacccaggaccctggatgctgcctgccctgcaactcagctgcccgaccccaggagtcgccatacctgtgaggtgtccacctccctgcacatggcactacccagactgccagagcccaggctggcctcatctgcaccatgtccccggaccagcccttgctctgactgcggccaagcaccacgcaggaggccactcttgtctctcagcagctgttcccaggaggcagctccctcctggcacatgggggctggccacaatagcccagagggtcagaactggacagctgcagagacctgtgcccagagaagggtctcgacccactcaaggacacacagcaggtccgtggatgggctggatgagtgaccagggccagcctctgtctcaggacattccagaaggacaaggagatgtctctccctctcccaaagcaccagcgtccctgcctcccgtgggccctgtccgggttgccctggtgaccccagcctctgtccacttcctaacccagggaccctgcacagccagaactgcctttggccctacggatggccactggctctggtctaaagtgcctgggcttggtggccatcaagagggagccagtcaggcctgtgagggccgtagaccttgtatataccctgcaccagcagtgaccgggcagagcccaaccccctccacgggggtcccagcacccacttttctaatcatgaatgaacaataaagcccacgctctttgtcaggctcaaaaaaaaaaaaaaaaaaaaaaaaaaaaaaaaaaaaa

SEQ ID NO: 74 - DNA, 1742 bp, Human
ttcccttactgagcttgctgagctccggggcccgcggagctcgcgccaggctcctgggaaaggacggggagtgttaccggggagcagctgctccattgtgcctcgaggccccgatcgggctaggccgacggcctccctcccttcacctttcctctcctggcggggttcggcggcgggcgagtgactgcggccacgcctgaaaggcgactctcctgattcaagatgaccaacgaagaacctcttcccaagaaggttcgattgagtgaaacagacttcaaagttatggcaagagatgagttaattctaagatggaaacaatatgaagcatatgtacaagctttggagggcaagtacacagatcttaactctaatgatgtaactggcctaagagagtctgaagaaaaactaaagcaacaacagcaggagtctgcacgcagggaaaacatccttgtaatgcgactagcaaccaaggaacaagagatgcaagagtgtactactcaaatccagtacctcaagcaagtccagcagccgagcgttgcccaactgagatcaacaatggtagacccagcgatcaacttgtttttcctaaaaatgaaaggtgaactggaacagactaaagacaaactggaacaagcccaaaatgaactgagtgcctggaagtttacgcctgataggtaaacaaatcatactccccagtcaagacttccctgacagtcccactacgagaaagctgtggtgggacagccaagtactcgtttccacaccaagactcagactttttgagccaaaaaaaagccacattcttacactgtccagcttgtaatggttaatgtaaaacttaccagatgaaccttgtgtttcagcttttttcttttccccttccccttgcttcagaggcctgatggcgtcggactattccgaagaagtggccacctccgaaaaattccccttctagaacatgtagacacttgagaaatgtttctgtttgaagaaaatagagggagaaacagaagtcttaagtctgtggcacactgtgtcttcagacagtttgaaggaatgaaaacctagagattttaaatcatgaattgaacatgtaaaattccagtaaaatgtaaaaacggaatatgcatcgctcttaaccttgagcatagtgacttagagacactgtgtatcagttttgccaataagactgtggacttcatgattgttgttgaacttctgggtcaaaactcaaatgaggtgaattttgcctttaaagggtttatttgctgagaaccaactttcaatagtcatgagagaatcaaataatagatgtccgtacaagtagcgcatatatttaaccatttagtttggggctctatattacttgcttgagccttaatcaatgtggttttattcaatggtttgttctttgaatggttgcaaaaactgtagataatcttactgaggactgtacaaacatgaaggtgtggtatcaaacttcaggttgaaactgtttgaagcattataaacattcatttcacaactagattgtataaggatattagctgtgatgagactcactgcattattttttttagtgaattttatgaaatccccgttccattcaacaggcacatgtttaaaagagctttgtcgttggtgttaatgggggaatgtgttccttcattgtatttgggccttttgtattgcactcttgatattaaattaaatgtgccttgaaataaaaaaaaaaaaaaaaa

SEQ ID NO: 75 - protein, 151 aa, Human
MTNEEPLPKKVRLSETDFKVMARDELILRWKQYEAYVQALEGKYTDLNSNDVTGLRESEEKLKQQQQESARRENILVMRLATKEQEMQECTTQIQYLKQVQQPSVAQLRSTMVDPAINLFFLKMKGELEQTKDKLEQAQNELSAWKFTPDR

SEQ ID NO: 76 - DNA, 1075 bp, Human
cgcagcaaacacatccgtagaaggcagcgcggccgccgagagccgcagcgccgctcgcccgccgccccccaccccgccgccccgcccggcgaattgcgccccgcgcccctcccctcgcgcccccgagacaaagaggagagaaagtttgcgcggccgagcggggcaggtgaggagggtgagccgcgcgggaggggcccgcctcggccccggctcagcccccgcccgcgcccccagcccgccgccgcgagcagcgcccggaccccccagcggcggcccccgcccgcccagccccccggcccgccatgggcgccgcggcccgcaccctgcggctggcgctcggcctcctgctgctggcgacgctgcttcgcccggccgacgcctgcagctgctccccggtgcacccgcaacaggcgttttgcaatgcagatgtagtgatcagggccaaagcggtcagtgagaaggaagtggactctggaaacgacatttatggcaaccctatcaagaggatccagtatgagatcaagcagataaagatgttcaaagggcctgagaaggatatagagtttatctacacggccccctcctcggcagtgtgtggggtctcgctggacgttggaggaaagaaggaatatctcattgcaggaaaggccgagggggacggcaagatgcacatcaccctctgtgacttcatcgtgccctgggacaccctgagcaccacccagaagaagagcctgaaccacaggtaccagatgggctgcgagtgcaagatcacgcgctgccccatgatcccgtgctacatctcctccccggacgagtgcctctggatggactgggtcacagagaagaacatcaacgggcaccaggccaagttcttcgcctgcatcaagagaagtgacggctcctgtgcgtggtaccgcggcgcggcgccccccaagcaggagtttctcgacatcgaggacccataagcaggcctccaacgcccctgtggccaactgcaaaaaaagcctccaagggtttcgactggtccagctctgacatcccttcctggaaacagcatgaataaaacactcatccc

SEQ ID NO: 77 - protein, 220 aa, Human
MGAAARTLRLALGLLLLATLLRPADACSCSPVHPQQAFCNADVVIRAKAVSEKEVDSGNDIYGNPIKRIQYEIKQIKMFKGPEKDIEFIYTAPSSAVCGVSLDVGGKKEYLIAGKAEGDGKMHITLCDFIVPWDTLSTTQKKSLNHRYQMGCECKITRCPMIPCYISSPDECLWMDWVTEKNINGHQAKFFACIKRSDGSCAWYRGAAPPKQEFLDIEDP

SEQ ID NO: 78 - DNA, 1286 bp, Mouse
cttctcgagcccggagccgctgccgccgcccccagctcccccgcctcggggagggcaccaggtcactgcagccagaggggtccagaagagagaggaggcactgcctccactacagcaactgcacccacgatgcagagcatcaagtgcgtggtggtgggtgatggggctgtgggcaagacgtgcctgctcatctgctacacaactaacgctttccccaaagagtacatccccaccgtgttcgacaattacagcgcgcagagcgcagttgacgggcgcacagtgaacctgaacctgtgggacactgcgggccaggaggagtatgaccgcctccgtacactctcctaccctcagaccaacgttttcgtcatctgtttctccattgccagtccgccgtcctatgagaacgtgcggcacaagtggcatccagaggtgtgccaccactgccctgatgtgcccatcctgctggtgggcaccaagaaggacctgagagcccagcctgacaccctacggcgcctcaaggagcagggccaggcgcccatcacaccgcagcagggccaggcactggccaagcagatccacgctgtgcgctacctcgaatgctcagccctgcaacaggatggtgtcaaggaagtgttcgccgaggctgtccgggctgtgctcaaccccacgccgatcaagcgtgggcggtcctgcatcctcttgtgaccctggcacttggcttggaggctgcccctgccctccccccaccagttgtgccttggtgccttgtccgcctcagctgtgccttaaggactaattctggcacccctttccagggggttccctgaatgcctttttctctgagtgcctttttctccttaaggaggcctgcagagaaaggggctttgggctctgcccccctctgcttgggaacactgggtattctcatgagctcatccaagccaaggttggacccctccccaagaggccaacccagtgccccctcccattttccgctactgaccagttcatccagctttccacacagttgttgctgcctattgtggtgccgcctcaggttaggggctctcagccatctctaacctctgccctcgctgctcttggaattgcgcccccaagatgctctctcccttctccaatgagggagccacagaatcctgagaaggtgaatgtaccctaacctgctcctctgtgcctaggccttacgcatttgctgactgactcagcccccatgcttctggggacctttcctacccccatcagcatcaataaaacctcctgtctcc

SEQ ID NO: 79 - DNA, 3564 bp, Human
ggatgctgcggtgagcgcggccgggacgccgcgtcgggctctcggccgcccagcggcgccgcaggggaagccaggccggcagccgcgcgctccccagccggccaccaatcccgccctccccggctcctccggacctcctcggcaggcggcggcggggcctgcctgtgcgctctgcgcccgcccgcgcctaccctccatggcgtttatccggaagaagcagcaggagcagcagctgcagctctactccaaggagagattttccttgctgctgcttaacttggaggagtactactttgaacagcatagagccaatcacattttgcacaagggcagtcaccatgaaaggaaaatcagaggctccttaaaaatatgttcaaaatcggtgatttttgaaccagattcaatatcccagcccatcatcaagattcctttgagagactgtataaaaataggaaagcatggagaaaatggagccaatagacacttcacaaaggcaaaatctgggggtatttcactcattttcagtcaggtatatttcattaaagaacataatgttgttgcaccatataaaatagaaaggggcaaaatggaatatgtttttgaattggatgttcccgggaaagtggaagatgttgtggagacgttgcttcagcttcacagagcatcctgccttgacaaattgggtgaccaaaccgccatgataacagctattttgcagtctcgtttagctagaacatcatttgacaaaaacaggttccaaaacatttctgaaaagctgcacatggaatgcaaagcagaaatggtgacgcctctggtgactaatcctggacacgtgtgcatcacggacacaaacctgtattttcagcccctcaacggctacccgaaacctgtggtccagataacactccaagatgtccgccgcatctacaaaaggaggcacggcctcatgcctctgggcttggaagtattttgcacagaagatgatctgtgttccgacatctacctaaagttctatgaacctcaagatagagatgatctctatttttacattgccacatacctagagcaccatgtggcggagcacactgctgagagctacatgctgcagtggcagcgtggacacctttccaactatcagtacctccttcacctcaacaacctggccgaccgcagctgcaacgacctctcccagtaccctgtgtttccatggataatacatgattattccagctcagaactagatttgtcaaatccaggaaccttccgggatctcagtaagccagtaggggccctaaataaggaacggctggagagactactgacacgctaccaggaaatgcctgaaccaaagttcatgtatgggagtcactactcttccccgggttatgtacttttttatcttgttaggattgcaccagagtatatgctgtgcctgcagaatggaagatttgataatgcagatagaatgttcaacagtattgcagaaacttggaaaaactgtctggatggtgcaacggattttaaagagttaattccagaattctatggtgatgatgtgagctttctagtcaatagcctgaagttggatttgggaaagagacaaggaggacagatggttgacgatgtggagcttcccccttgggcttccagtcccgaggactttctccagaagagcaaagatgcattggaaagcaattatgtgtctgaacaccttcacgagtggattgatctaatatttggctacaaacaaaaagggagtgatgcagttggggcccataatgtatttcatcccctgacctatgaaggaggtgtagacttgaacagcatccaggatcctgatgagaaggtagccatgcttacgcaaatcttggaatttgggcagacaccaaaacaactatttgtgacaccacatcctcgaaggatcaccccaaagtttaaaagtttgtcccagacctccagttataatgcttctatggcagattccccaggtgaagagtcttttgaagacctgaccgaagaaagcaaaacactggcctggaataacatcaccaaactgcagttacacgagcactataaaatccacaaagaagcagttactggaatcacggtctctcgcaatggatcttcagtattcacaacatcccaagattccaccttgaagatgttttctaaagaatcaaaaatgctacaaagaagtatatcattttcaaatatggctttatcgtcttgtttacttttaccaggagatgccactgtcataacttcttcatgggataataatgtctatttttattccatagcatttggaagacgccaggacacgttaatgggacatgatgatgctgttagtaagatctgttggcatgacaacaggctatattctgcatcgtgggactctacagtgaaggtgtggtctggtgttcctgcagagatgccaggcaccaaaagacaccactttgacttgctggccgagctggaacatgatgtcagtgtagatacaatcagtttaaatgctgcaagcacactgttagtttccggcaccaaagaaggcacagtgaatatttgggacctcacaacggccaccttaatgcaccagattccatgccattcagggattgtatgtgacactgcttttagcccagatagtcgccatgtcctcagcacaggaacagatggctgtcttaatgtcattgatgtgcagacaggaatgctcatctcctccatgacatcagatgagccccagaggtgctttgtctgggatggaaattccgttttatctggcagtcagtctggtgaactgctcgtttgggacctccttggagcaaaaatcagtgagagaatacagggccacacaggtgctgtgacatgtatatggatgaatgaacagtgtagcagtatcatcacaggaggggaagacagacaaattatattctggaaattgcagtattaagtgccttttcctctcctgaatattaaattgaactctatttaatgcatttttaaaccaaacttttaaacggactggtgaatgtgcaatgttagtaattagaagttttaccacatggaaaatttgtggttttaaactttctaaatcatggtgacttcattgaaagccattagttgctattctcttagggcagataaaatgcggctgtgttaggaaaaacatgttacactgtaaggcagatgatcgtccccgtatgatgattgtcagaagacaggactaagtagcagagaatagctaagagataaattgggctggggaaacttgtcagaaagcactgaacaattaagaaattttccaagaaaatgtgcagtattctctgctacttctgaatctgttttgtcttcctaatctatcacaattgccacccatcgggttttgggtgtgtgttttcatagcgtggttactttctataatgctgtacccagattctaagaacctggagaaggattagcagttcttagtaagtttactgtgtataggaacggtttgtatttcattacagctattcatcttttctacattaaaaatatttttctctaaagaaaaaaaaaaaaaaa

SEQ ID NO: 80 - DNA, 2223 bp, Human
tctccttgttttgctttcgatctggactgttctcaggcaagccggggagtaacttttagttttgctcctgcgattattcaactgacgggctttcatttccatttcacacaccctagcaacacttataccttgcggaattgtattggtagcgtgaaaaaagcacactgagagggcaccatgccggtggaaaggatgcgcatgcgcccgtggctggaggagcagataaactccaacacgatcccggggctcaagtggcttaacaaggaaaagaagatttttcagatcccctggatgcatgcggctagacatgggtgggatgtggaaaaagatgcaccactctttagaaaccgggcaatccatacaggaaagcatcaaccaggagtagataaacctgatcccaaaacatggaaggcgaatttcagatgcgccatgaattccttgcctgatattgaagaagtcaaggataaaagcataaagaaaggaaataatgccttcagggtctaccgaatgctgcccctatcagaacggccttctaagaaaggaaagaaaccaaagacagaaaaagaagacaaagttaagcacatcaagcaagaaccagttgagtcatctctggggcttagtaatggagtaagtgatctttctcctgagtatgcggtcctgacttcaactataaaaaatgaagtggatagtacggtgaacatcatagttgtaggacagtcccatctggacagcaacattgagaatcaagagattgtcaccaatccgccagacatttgccaagttgtagaggtgaccactgagagcgacgagcagccggtcagcatgagcgagctctaccctctgcagatctcccccgtgtcttcctatgcagaaagcgaaacgactgatagtgtgcccagcgatgaagagagtgccgaggggcggccacactggcggaagaggaatattgaaggcaaacagtacctcagcaacatggggactcgaggctcctacctgctgcccggcatggcgtccttcgtcacttccaacaaaccggacctccaggtcaccatcaaagaggagagcaatccggtgccttacaacagctcctggcccccttttcaagacctccccctttcttcctccatgaccccagcatccagcagcagtcggccagaccgggagacccgggccagcgtcatcaagaaaacatcggatatcacccaggcccgcgtcaagagctgttaagcctctgactctccgcggtggttgttggggcttcttggctttgttttgttgtttgtttgtattttatttttttctctctgacacctattttagacaaatctaagggaaaaagccttgacaatagaacattgattgctgtgtccaactccagtacctggagcttctctttaactcaggactccagcccattggtagacgtgtgtttctagagcctgctggatctcccagggctactcactcaagttcaaggaccaacaagggcagtggaggtgctgcattgcctgcggtcaaggccagcaaggtggagtggatgcctcagaacggacgagataatgtgaactagctggaattttttattcttgtgaatatgtacataggcagcactagcgacattgcagtctgcttctgcaccttatcttaaagcacttacagataggccttcttgtgatcttgctctatctcacagcacactcagcacccccttctctgcccattccccagcctctcttcctatcccatcccatcccatcccatcccatcccatcccatcccgctcttttcctacttttccttccctcaaagcttccattccacatccggaggagaagaaggaaatgaatttctctacagatgtcccattttcagactgctttaaaaaaaatccttctaatctgctatgcttgaatgccacgcggtacaaaggaaaaagtatcatggaaatattatgcaaattcccagatttgaagacaaaaatactctaattctaaccagagcaagcttttttattttttatacaggggaatattttattcaaggtaaaattctaaataaaatataattgttttttatcttttctacagcaaatttataattttaagattccttttcttgtttatcagcagttgttattacatccttgtggcacatttttttttaattttgtaaaggtgaaaaaagcttttatgagctcatctagcaatcagattttcctgtgga

SEQ ID NO: 81 - protein, 349 aa, Human
MPVERMRMRPWLEEQINSNTIPGLKWLNKEKKIFQIPWMHAARHGWDVEKDAPLFRNRAIHTGKHQPGVDKPDPKTWKANFRCAMNSLPDIEEVKDKSIKKGNNAFRVYRMLPLSERPSKKGKKPKTEKEDKVKHIKQEPVESSLGLSNGVSDLSPEYAVLTSTIKNEVDSTVNIIVVGQSHLDSNIENQEIVTNPPDICQVVEVTTESDEQPVSMSELYPLQISPVSSYAESETTDSVPSDEESAEGRPHWRKRNIEGKQYLSNMGTRGSYLLPGMASFVTSNKPDLQVTIKEESNPVPYNSSWPPFQDLPLSSSMTPASSSSRPDRETRASVIKKTSDITQARVKSC

SEQ ID NO: 82 - DNA, 6072 bp, Human
ggtggtcggcggggaggcccccgcgctttaaaataatgcccgcggcgcccgcgcgaccatgcaatggcgagcgctcgtcctggggctggtgctcctccggcttggcctccatggagtattgtggctcgtcttcgggctggggcccagcatgggcttctaccagcgctttccgctcagcttcggcttccagcgtctgaggagccccgacggccccgcgtcgcccacctcggggcccgtgggccggcctgggggggtatccgggccgtcgtggctgcagccgccggggaccggggcagcgcagagcccgcgcaaggctccgcggcgtcctgggccggggatgtgcggcccagccaactggggctacgtgctgggcggccggggccgcggcccggacgagtacgagaagcgctacagcggcgccttccctccgcagctgcgtgcccagatgcgcgacctggcacggggcatgttcgtctttggctacgacaactacatggctcacgccttcccccaggacgagctcaaccccatccactgccgcggccgtgggcccgaccgcggggacccttcaaatctgaacatcaatgatgtactagggaactactcattgactcttgttgatgcattggatacacttgcaataatgggaaattcatccgagttccagaaagcagtcaagttagtgatcaacacagtttcatttgacaaagattccaccgtccaagtctttgaggccacgataagggtcctgggaagcctcctttctgctcacagaataataactgactccaagcagccctttggtgacatgacaattaaggactatgataatgagttgttatacatggcccatgacctggcggtgcggctcctccctgcttttgaaaacaccaagacagggattccatatcctcgggtgaatctaaagacaggagttcctcctgacaccaataatgagacatgcacagcgggagccggttccctcctggtggaatttgggattctgagtcgactcctgggggactccacatttgagtgggtggccagacgagcagtgaaagccctttggaacctccggagcaatgatacaggattactaggcaatgtcgtgaacattcagacgggccactgggttggaaagcagagtggcctgggtgccgggctggactccttctatgaatacctcttgaaatcttacattctctttggagaaaaagaagacctagaaatgtttaatgctgcatatcagagtattcagaactacttaagaagagggcgggaagcctgcaatgaaggagaaggagaccctccactctatgtcaacgtgaacatgttcagtgggcagctgatgaacacctggattgactctctgcaggcctttttccctggactgcaggtgctgataggagatgtggaagatgccatctgccttcatgccttctactatgccatatggaaacgatatggtgccctccctgagagatataactggcagctgcaggcccctgacgttctcttctacccactgagaccagagttagtggaatccacatatctcctctaccaggcaaccaagaatcccttctacctccatgtaggaatggatattctgcagagtctggaaaagtacacaaaagtcaagtgtgggtacgccacgctgcatcacgtcattgacaagtccacagaagaccggatggagagcttctttctcagtgagacctgtaaatatttgtatctgctgtttgatgaagacaatccagtacacaagtctggaaccagatacatgttcacaacagagggacacattgtatctgtggatgagcatcttcgggaattgccatggaaggaattcttctctgaagagggagggcaggaccaagggggaaagtctgtgcacaggccgaaacctcatgagttaaaagtcatcaactccagctccaactgcaatcgtgtacctgatgagaggaggtactccctgcccttaaagagcatctacatgcgacagattgaccagatggttggtttgatttgatctgctctctgtgaggcctcatcttgaaccagaccttaacgaccaaacccagaccatgccaaagtccagtctgaaatgaaaggggacagaagtcttgctgtccatggtggtgtaggaatttctgtgcaacacctcaccacgtctggttaatccttgcacacttcagtgtttctctcctgttcaataaaatgccctgttaaggatataatttgaagtgagaagatacatggaaattgccctcttatgacatgttgatgttataagcacaatagatggggcatctttggattgatgttcacagctttatacttcagaacctaagtctcttcactttgctggcacctgctatactggagtattgctatgtctttaaaaaatttttttttattatattttatttttttgagacagggtcttgatatttttttgggacagggttacctgggctcaagtgatccttctgcctcagcctcccgagtagctgggattacaggtgagcaccactgtacctggctagctacttctttgttagaggattgagaatgaaatttctgcaaaagggcccatggttcatttggtatccctatttaattgcattgaaaatgtcatcctttctgttgttagataattggggtcttcccctgatatccaaccgtgattttggatcacatgggagaaaaagtcatccagtttttcatgtttgcctcaagtaatctttacagtgttacaaattatttgcttaagaagaatggtcttaaccagaattcttaacagatagtctcttaggttattatgttatggtctaagaggttaactgacatcttttggatggtattttgcattttgaatatgaacttacctgaggaactcccatagttccagaatcaggtgccttttagggagagaacaatacctaagattgtctgagcttccatctttctcatatttcctaagcaaggattctcacttatgaccatatttgggttagagttctgttttgtttctgttttctgtgtctagtgccaattagctaaatcagggagaaagaaatgatcacatgacttttagcatccttgagccatttctctgtgtaatacaggctttagattagtgccttatattggttttggtttggggcactggatgtcgcagctactgctatggtttcaggaggcctgtttagccacatggtgagaccgtggtgaaagggggatggaaattgcttggccagtctttgcctttcatcctgtaaaagtaagcatgtagaaggaggaagttgtgctaaaatgcctttgtttttttgttattattttcttagccagaacatctctctttgaactcacactgatacacacctgctactcttacacagtgcagcagggctgactcttagtctggcttccatgaagcgtcatgggtggaaacgcattctagtaaaaaaggtaggaaatccctaaaacttccagcctcacatagcacggttctcacctgtcactgttttcccacctctaaggatttcatgtacatcttttcaaagctagaaataagcactgtctaagtttatgttgcatttttagtcaaaagggagaaatcttattccttcttgaaaattttaagtgttatggttttatatagttcagttctttgagatttttgaaaagagtattttcagtaataaacgtgccatctctatctcttaaacatttattacaacaattgttttaaaatagaaaaaataaaatgcttctattttaccttttttcatttcagaagcattattctgtttattaacagtgtcccatctactgaatagaaaactttgagaataatatatatatatattttaaatgttttcactgactcattgaaaatgttaattacacacacatgcatgcatgcacacacgagcatacttgtacctttgtctctgggcaaacaggtgggactgttagtgacccatttgggaaaatagagcatctcagagaaggaggtgagttcttcctgcctgtgatttctcttggcgctcccctcctctcccgctctggcttctgtggcggcagtggtgggtaagcactccagtgttctcttaatgaggcactttgcctgtcactcgagcaagcctgggtgttccttcctcctcatgctcctggaatagggaatagggatctcatgcttgcaaactacacaatgctgcaggtgcttcccaggggccacaggctgtcaggaaacgtgttttatgttaagtcacaaacccacttgacttctgggtactggaattaataccagtgggtgagactgagggtgagtgagttagtacatattaatcctggttgttgagcttccagactaccccgtccaaagtttgatgctatgtagtcagtggtttgtggggctggatgccagaaggttctttgagccagtttcaaaggttacttgtttttttttttttttttttaagtcagaatgttaacagctgtgatatatcctgcagggcttttgcagtttcttctgttctgtgttctgaaatcctgggtagagaatggctgaggaggagattaccagagaagttgctttgctcagtgctttgccccaggattgcctcaaatctgagtggacttcatcctttgcggcggctctgagcctggcccatcttcctattcccacgtgtagctagtgtctagtgtcagctttgctcaatgtggtggaaacattttgcagaactgttgtagaaagctgccttatagttggcttgacaaagcataattctctcataacaaactttcaaatcattacagtagcttagctactttagttgatgtgaccgaggaatcccttctagaatcataggtggcaagggagggtttgctagctctccatttgcactggccattgtgaaaaaccagcttctgtattcaaatctttccttcatttttttaaattttttttttggcagcgcttgtgctggaacttactcattgtaactgaatcctcagggcttttcttgttttagatcatggactgtgcacgtgacacttaaataattttctatgtatttaaagaaaaatgcaccaggatggtgtctgtgcacgtgactattagaggagcgtctgtagaagtacctggtttggtcagtgcagttgtgcaatctgagggccttgtttcctcctcccctttccccttctccccaccaaaggaaaatatccctcttaatgatttcgtagttcagtttactgaatgattaccacctgtaattcctctttggattgtgtagactcaacatgagacattcctttctgctttctggagggcaccaggggcctttctctttgataaattttttttgtctgttgacaaaaacaaaaatcttttttcaaatgtagtgctggtgaaaaggtagggctgagtgattaccttagccacagggtggctgagcaggaactttagaagaaaatcctgagctttcctgtccattcccagcatccagctcctattctagtgcctcttccctgcagggcagggaccccttgggaaatcgaggaggtgggacgggctgggccctgtgtcccaggtttcacagggctcagggttatgctcccgcttgaatctggacgtgaatctggtaaaaatatcaagtacctgtggaactccctgattctataccctcttccttctttctgcaaggcagaggaataatatttttaaaggttattttgttttagttttaaatagcaaaacacaagctgcatttttatttattttgcataagaaaggtaaatctttttacaaaaaaaagtatagagttggaaactctgggaaaacttacggaaatacacaaatgcttctctgtaatgtgcaatatgctttgcaactgtagatgatattttatgtttaatctgtaaataagaaatgtatttaaattaaaagggatctttttgtaaaaggaccaaatgttcttttataaatgtaataaggaatatcttgctctttaaaatttattaggatttttatgagtaatttttattaaaagatttctttttttg

SEQ ID NO: 83 - protein, 657 aa, Human
MQWRALVLGLVLLRLGLHGVLWLVFGLGPSMGFYQRFPLSFGFQRLRSPDGPASPTSGPVGRPGGVSGPSWLQPPGTGAAQSPRKAPRRPGPGMCGPANWGYVLGGRGRGPDEYEKRYSGAFPPQLRAQMRDLARGMFVFGYDNYMAHAFPQDELNPIHCRGRGPDRGDPSNLNINDVLGNYSLTLVDALDTLAIMGNSSEFQKAVKLVINTVSFDKDSTVQVFEATIRVLGSLLSAHRIITDSKQPFGDMTIKDYDNELLYMAHDLAVRLLPAFENTKTGIPYPRVNLKTGVPPDTNNETCTAGAGSLLVEFGILSRLLGDSTFEWVARRAVKALWNLRSNDTGLLGNVVNIQTGHWVGKQSGLGAGLDSFYEYLLKSYILFGEKEDLEMFNAAYQSIQNYLRRGREACNEGEGDPPLYVNVNMFSGQLMNTWIDSLQAFFPGLQVLIGDVEDAICLHAFYYAIWKRYGALPERYNWQLQAPDVLFYPLRPELVESTYLLYQATKNPFYLHVGMDILQSLEKYTKVKCGYATLHHVIDKSTEDRMESFFLSETCKYLYLLFDEDNPVHKSGTRYMFTTEGHIVSVDEHLRELPWKEFFSEEGGQDQGGKSVHRPKPHELKVINSSSNCNRVPDERRYSLPLKSIYMRQIDQMVGLI

SEQ ID NO: 84 - DNA, 5423 bp, Human
cccgggccaccgcctccgcccggctgcccgcccggactgtcgcggcccgcggtggcgacggcggccgctgcaaagtttccccggcggcggcggcccgggggcgcatcctcccgcaactgtcaagcgctggcggcggaaatgatgaggcgctggccattttccgagcccgggtttcctgcctgagccccgctcgagcgagccgcgagcgaggagccggcgggcgggagaggacgcgcccagggcgggggcccgcccgccccctcgggatttcgagggcccgggggcgcgcgacgccatgggccggccgggcccagagctcctgtctctcagcccggccgcaccacctgggtctccgccatgaacgggcctgccctgcagccctcctcgccctcttccgcgccctcagcctccccggcggcggccccgcggggctggagcgagttctgtgagttgcacgccgtagcggcggcccgggagctggcccgccagtactggctgttcgcccgggagcatccgcagcacgcgccgctgcgcgccgagctggtgtcgctgcagttcaccgacctcttccagcgctacttctgccgcgaggtgcgcgacggacgggcgccgggccgcgactaccgggacacaggccgtgggcccccagccaaggccgaggcgtccccggagccaggccccggccccgccgcccctggcctgcccaaggcccgcagctctgaggagctggccccgccgcggccgcccgggccctgctccttccagcactttcgccgcagcctccgccacatcttccgccgccgctcggccggggagctgccagcggcccacaccgctgccgcccccgggacccccggagaggctgctgagacccccgcccggcctggcctggccaagaagttcctgccctggagcctggcccgggagccgccacccgaggcgctgaaggaggcggtgctgcgctacagcctggccgacgaggcctccatggacagcggggcacgctggcagcgcgggaggctggcgctgcgccgggccccgggccccgatggccccgaccgcgtgctggagctcttcgacccacccaagagttcaaggcccaagctacaagcagcttgctccagcatccaggaggtccggtggtgcacacggcttgagatgcctgacaacctttacacctttgtgctgaaggtgaaggaccggacagacatcatctttgaggtgggagacgagcagcagctgaattcatggatggctgagctctcggagtgcacaggccgagggctggagagcacagaagcagagatgcatattccctcagccctagagcctagcacgtccagctccccaaggggcagcacagattcccttaaccaaggtgcttctcctggggggctgctggacccggcctgccagaagacggaccatttcctgtcctgctacccctggttccacggccccatctccagagtgaaagcagctcagctggttcagctgcagggccctgatgctcatggagtgttcctggtgcggcagagcgagacgcggcgtggggaatacgtgctcactttcaactttcaggggatagccaagcacctgcgcctgtcgctgacagagcggggccagtgccgtgtgcagcacctccactttccctcggtcgtggacatgctccaccacttccagcgctcgcccatcccactcgagtgcggcgccgcctgtgatgtccggctctccagctacgtggtagtcgtctcccaaccaccaggttcctgcaacacggtcctcttccctttctcccttcctcactgggattcagagtcccttcctcactggggttcagagttgggccttccccaccttagttcttctggctgtccccgggggctcagcccagagggtctcccagggcgatcctcaccccccgagcagatcttccacctggtgccttcgcccgaagaactggccaacagcctgcagcacctggagcatgagcctgtgaatcgagcccgggactcggactacgaaatggactcatcctcccggagccacctgcgggccatagacaatcagtacacacctctctgaccagtgaggaattccaggcctcaacagctgcccttgaggagcacaggcagaagtgtgaacttgtgaatgtaattgatctttccttccttccagagaaagatttaagggacactgttaactgctcgtgccagtttggaagtgacccttctattaggcctgttgaagggccctcctgtaggtttcatctatccacctggctttctccttattgtttacagatgtagttcttgttagaggatgccgctagctcctgcccggggtccctatgcccagtccccgttactcttagagaaaggagttggggtgagggccagagctggcagtggaaacttgttctctttttcactgacactgtcacagcggatgacagactttctacggggaggagggggggatcatcaggaagcccagaacactaacaagcggttctcccatctaccgtcagtccacatggcaggtctgctgtgtccacaccacagatgaccacatctaatcctgcttctactctcagctttaggacaaaagctctgtcagaggcacaagctgaaggtcaaaaatgatttaaaacattttacctcagactaatttctttaaaggattcaggttcaaaacttaaccactgcttatttcagtgcactgtttcaactaacacccatgctatttttgtagtcagaaacagctatgcaaaccctacctaatttacagtctgagccagcatgctggcttgtctactgcatcctcgggacagtcacctgccactgagtggccactgtccttcctaaatgtcaagaagtgaagtatgtcaccctttcagggaaattcaggcaattactgaaataggaaggtggcaagaacagttctatcctggtgccttacgaataaaaaactggattctggtttacagcagctttacagtgatagttaaattaactggggctaggggaaaagcaaccaaaaagggaaaaaggactcctaggccctttctattaaatccttcagcaacaaggctggcttggtgccctccaagcatctaatggcttattaaattatcccacaattgggttttaggctccttttttgacccaaaatggaagctgggaatctggtgccataactaatgagaaactcctttaataccccacaatcagtgttctgttctacctggctactgcttcactggattgaaaatctatctatctccttgcacacatgggcacacacaatctccaccatccagggaggtcctgaattcaaatctctatctatccaagtgatacaattcatagggggctggctcctcccagaacctgtctggaggctcagaaacgggggcagtgacagtggagtcagctgctcttgggtgccagcagagccattcagtacaacccccaggctcacagcagtggcttctaggaaactgggagtttagatcagctttacagatacatcgatcagaggctaaaatgaaacctcagcctaaaactcataggactgactgcctgggaggagggttaggtctgcttcttccacttatacttagtctctgtgctccaagaggtcaaatttttgcttctagaatttccttggggtctttcagagggtgggggaacaaacccctatgcacttttcttttttttttttgagatggagtttctcttgtcaaccgggctggagtgcagtggtgcaatcttggctcactgcaacctccaccttcctggttcaagcgattctgcctcgacctctcaagtagctgggattacaagcaccagccaccatgcctggctaattttgtatttttagtagagacagggtttcaccatgttggccaggctggtctcgaatgtctgacctcaggtgatccacccgccttggcctcccaaagtgctgggattacaggcgcgagccaccgcgcccagcctacaccacttttagtaccaacactcttgggtgatttcatggaccctaaagcagacctgacactgatccagatttgcagtccatttttaaggacacctgtctttatttcctcaaagtcaagcagctttctctggaaaatgaatgctaattagtgtgaaccaaaagagtaagtaagagtctgaagtttttttaaaggagaaagcttattatggaaagtcactggtcctcccctccgcacaggaaaggtacccagtagataatgaaccaaattaagttccctccctccagccagaagttaaacatctgggatatgacgtcttcatgccaggggcactcatttcttagcagcctctctacatacatctctcaggtggtgccaagaggcacaccaggtagagcaaacttagcagctctgactaacaggctgcaaagtgcaagttcagattctgtggcagagatttggagggcacccacgtccagactgcttcccgtccaagttaccaggacagctcaaaaacatgctgacagaaaactcccatggctctaggaaaaagtgacactaagccaacacctttctttatgtgggagcaaaatcagctgatgaaggggtgggcaccattgtggggcaggcaccccactggctgcagctagcccaccataggcacagcacatcccaccactctccttccagtcctgaccaggccccagccggcaacttctaccgagagccatggctcaacaccaaactggacagtagacatcatgatccctccagttagctctaattacagaccccaccagtacagcttgacagctcccggcaccatcccttccttcatctgacttattgaacttttacaaactaacagtcaccagcaccaaagaattaagtcaactaacctgccttgaattttaaaccagcaatccatatggctttatctggtataaatcttctgcctttgatcatttctggaccgtaggaaaaaggaatagcaatcattaaaatcttgggccagagaacactatttttacataacagtttcttaacctaaagtcaaggccttggactcttccctgagggttgcctgaaattccttcatgctttctattcaggactaattcccttactgcaaatgtgttagctctaacatctcccacaagctaaaggaacttgcaagtatattaacaaggacacatctgacatcctgtgtttggttaaaatatacagcacattgtgataacataaagtggatccatcttgtatcattataggcaaaaggtatttggcaaatttttatgtatggttttatgtactgtacaagtaacttattcttgaataatgcaaattttgctataatgtacaaattgctatatgtgaattaaaaagtttccaaaatcttgaaaaaaaaaaaaaaaaaaaa

SEQ ID NO: 85 - protein, 575 aa, Human
MNGPALQPSSPSSAPSASPAAAPRGWSEFCELHAVAAARELARQYWLFAREHPQHAPLRAELVSLQFTDLFQRYFCREVRDGRAPGRDYRDTGRGPPAKAEASPEPGPGPAAPGLPKARSSEELAPPRPPGPCSFQHFRRSLRHIFRRRSAGELPAAHTAAAPGTPGEAAETPARPGLAKKFLPWSLAREPPPEALKEAVLRYSLADEASMDSGARWQRGRLALRRAPGPDGPDRVLELFDPPKSSRPKLQAACSSIQEVRWCTRLEMPDNLYTFVLKVKDRTDIIFEVGDEQQLNSWMAELSECTGRGLESTEAEMHIPSALEPSTSSSPRGSTDSLNQGASPGGLLDPACQKTDHFLSCYPWFHGPISRVKAAQLVQLQGPDAHGVFLVRQSETRRGEYVLTFNFQGIAKHLRLSLTERGQCRVQHLHFPSVVDMLHHFQRSPIPLECGAACDVRLSSYVVVVSQPPGSCNTVLFPFSLPHWDSESLPHWGSELGLPHLSSSGCPRGLSPEGLPGRSSPPEQIFHLVPSPEELANSLQHLEHEPVNRARDSDYEMDSSSRSHLRAIDNQYTPL

SEQ ID NO: 86 - DNA, 5273 bp, Human
ctagggcatggcatcccacgtgggtgtcagcacggccgcagaagaaccacttctctggcccacccatgcctgctaggccatgcttcttcagaagtggccacaactctcctgacgtctccagagccggtcattccacccagggggacttcagctgccactggacacttcaattgtacgctgcgaccagttgccaggaaggagagggctggcaagaaagccgcggcagccgtggcagggtgtatgggacggtggacggccagggcccccccctctctctctttctctctctctctcttgcttggtttctgtaatgaggaagttctccgcagctcagtttcctttccctcactgagcgcctgaaacaggaagtcagtcagttaagctggtggcagcagccgaggccaccaagaggcaacgggcggcaggttgcagtggaggggcctccgctcccctcggtggtgtgtgggtcctgggggtgcctgccggcccagccgaggaggcccacgcccaccatggtcccctgctggaaccatggcaacatcacccgctccaaggcggaggagctgctttccaggacaggcaaggacgggagcttcctcgtgcgtgccagcgagtccatctcccgggcatacgcgctctgcgtgctgtatcggaattgcgtttacacttacagaattctgcccaatgaagatgataaattcactgttcaggcatccgaaggcgtctccatgaggttcttcaccaagctggaccagctcatcgagttttacaagaaggaaaacatggggctggtgacccatctgcaataccctgtgccgctggaggaagaggacacaggcgacgaccctgaggaggacacagaaagtgtcgtgtctccacccgagctgcccccaagaaacatcccgctgactgccagctcctgtgaggccaaggaggttcctttttcaaacgagaatccccgagcgaccgagaccagccggccgagcctctccgagacattgttccagcgactgcaaagcatggacaccagtgggcttccagaagagcatcttaaggccatccaagattatttaagcactcagctcgcccaggactctgaatttgtgaagacagggtccagcagtcttcctcacctgaagaaactgaccacactgctctgcaaggagctctatggagaagtcatccggaccctcccatccctggagtctctgcagaggttatttgaccagcagctctccccgggcctccgtccacgtcctcaggttcctggtgaggccaatcccatcaacatggtgtccaagctcagccaactgacaagcctgttgtcatccattgaagacaaggtcaaggccttgctgcacgagggtcctgagtctccgcaccggccctcccttatccctccagtcacctttgaggtgaaggcagagtctctggggattcctcagaaaatgcagctcaaagtcgacgttgagtctgggaaactgatcattaagaagtccaaggatggttctgaggacaagttctacagccacaagaaaatcctgcagctcattaagtcacagaaatttctgaataagttggtgatcttggtggaaacagagaaggagaagatcctgcggaaggaatatgtttttgctgactccaaaaagagagaaggcttctgccagctcctgcagcagatgaagaacaagcactcagagcagccggagcccgacatgatcaccatcttcatcggcacctggaacatgggtaacgccccccctcccaagaagatcacgtcctggtttctctccaaggggcagggaaagacgcgggacgactctgcggactacatcccccatgacatttacgtgatcggcacccaagaggaccccctgagtgagaaggagtggctggagatcctcaaacactccctgcaagaaatcaccagtgtgacttttaaaacagtcgccatccacacgctctggaacatccgcatcgtggtgctggccaagcctgagcacgagaaccggatcagccacatctgtactgacaacgtgaagacaggcattgcaaacacactggggaacaagggagccgtgggggtgtcgttcatgttcaatggaacctccttagggttcgtcaacagccacttgacttcaggaagtgaaaagaaactcaggcgaaaccaaaactatatgaacattctccggttcctggccctgggcgacaagaagctgagtccctttaacatcactcaccgcttcacgcacctcttctggtttggggatcttaactaccgtgtggatctgcctacctgggaggcagaaaccatcatccaaaaaatcaagcagcagcagtacgcagacctcctgtcccacgaccagctgctcacagagaggagggagcagaaggtcttcctacacttcgaggaggaagaaatcacgtttgccccaacctaccgttttgagagactgactcgggacaaatacgcctacaccaagcagaaagcgacagggatgaagtacaacttgccttcctggtgtgaccgagtcctctggaagtcttatcccctggtgcacgtggtgtgtcagtcttatggcagtaccagcgacatcatgacgagtgaccacagccctgtctttgccacatttgaggcaggagtcacttcccagtttgtctccaagaacggtcccgggactgttgacagccaaggacagattgagtttctcaggtgctatgccacattgaagaccaagtcccagaccaaattctacctggagttccactcgagctgcttggagagttttgtcaagagtcaggaaggagaaaatgaagaaggaagtgagggggagctggtggtgaagtttggtgagactcttccaaagctgaagcccattatctctgaccctgagtacctgctagaccagcacatcctcatcagcatcaagtcctctgacagcgacgaatcctatggcgagggctgcattgcccttcggttagaggccacagaaacgcagctgcccatctacacgcctctcacccaccatggggagttgacaggccacttccagggggagatcaagctgcagacctctcagggcaagacgagggagaagctctatgactttgtgaagacggagcgtgatgaatccagtgggccaaagaccctgaagagcctcaccagccacgaccccatgaagcagtgggaagtcactagcagggcccctccgtgcagtggctccagcatcactgaaatcatcaaccccaactacatgggagtggggccctttgggccaccaatgcccctgcacgtgaagcagaccttgtcccctgaccagcagcccacagcctggagctacgaccagccgcccaaggactccccgctggggccctgcaggggagaaagtcctccgacacctcccggccagccgcccatatcacccaagaagtttttaccctcaacagcaaaccggggtctccctcccaggacacaggagtcaaggcccagtgacctggggaagaacgcaggggacacgctgcctcaggaggacctgccgctgacgaagcccgagatgtttgagaaccccctgtatgggtccctgagttccttccctaagcctgctcccaggaaggaccaggaatcccccaaaatgccgcggaaggaacccccgccctgcccggaacccggcatcttgtcgcccagcatcgtgctcaccaaagcccaggaggctgatcgcggcgaggggcccggcaagcaggtgcccgcgccccggctgcgctccttcacgtgctcatcctctgccgagggcagggcggccggcggggacaagagccaagggaagcccaagaccccggtcagctcccaggccccggtgccggccaagaggcccatcaagccttccagatcggaaatcaaccagcagaccccgcccaccccgacgccgcggccgccgctgccagtcaagagcccggcggtgctgcacctccagcactccaagggccgcgactaccgcgacaacaccgagctcccgcatcacggcaagcaccggccggaggaggggccaccagggcctctaggcaggactgccatgcagtgaagccctcagtgagctgccactgagtcgggagcccagaggaacggcgtgaagccactggaccctctcccgggacctcctgctggctcctcctgcccagcttcctatgcaaggctttgtgttttcaggaaagggcctagcttctgtgtggcccacagagttcactgcctgtgaggcttagcaccaagtgctgaggctggaagaaaaacgcacaccagacgggcaacaaacagtctgggtccccagctcgctcttggtacttgggaccccagtgcctcgttgagggcgccattctgaagaaaggaactgcagcgccgatttgagggtggagatatagataataataatattaataataataatggccacatggatcgaacactcatgatgtgccaagtgctgtgctaagtgctttacgaacattcgtcatatcaggatgacctcgagagctgaggctctagccacctaaaacacgtgcccaaacccaccagtttaaaacggtgtgtgttcggaggggtgaaagcattaagaagcccagtgccctcctggagtgagacaagggctcggccttaaggagctgaagagtctgggtagcttgtttagggtacaagaagcctgttctgtccagcttcagtgacacaagctgctttagctaaagtcccgcgggttccggcatggctaggctgagagcagggatctacctggcttctcagttctttggttggaaggagcaggaaatcagctcctattctccagtggagagatctggcctcagcttgggctagagatgccaaggcctgtgccaggttccctgtgccctcctcgaggtgggcagccatcaccagccacagttaagccaagccccccaacatgtattccatcgtgctggtagaagagtctttgctgttgctcccgaaagccgtgctctccagcctggctgccagggagggtgggcctcttggttccaggctcttgaaatagtgcagccttttcttcctatctctgtggctttcagctctgcttccttggttattaggagaatagatgggtgatgtctttccttatgttgctttttcaacatagcagaattaatgtagggagctaaatccagtggtgtgtgtgaatgcagaagggaatgcaccccacattcccatgatggaagtctgcgtaaccaataaattgtgcctttcttaaaaa

SEQ ID NO: 87 - protein, 1188 aa, Human
MVPCWNHGNITRSKAEELLSRTGKDGSFLVRASESISRAYALCVLYRNCVYTYRILPNEDDKFTVQASEGVSMRFFTKLDQLIEFYKKENMGLVTHLQYPVPLEEEDTGDDPEEDTESVVSPPELPPRNIPLTASSCEAKEVPFSNENPRATETSRPSLSETLFQRLQSMDTSGLPEEHLKAIQDYLSTQLAQDSEFVKTGSSSLPHLKKLTTLLCKELYGEVIRTLPSLESLQRLFDQQLSPGLRPRPQVPGEANPINMVSKLSQLTSLLSSIEDKVKALLHEGPESPHRPSLIPPVTFEVKAESLGIPQKMQLKVDVESGKLIIKKSKDGSEDKFYSHKKILQLIKSQKFLNKLVILVETEKEKILRKEYVFADSKKREGFCQLLQQMKNKHSEQPEPDMITIFIGTWNMGNAPPPKKITSWFLSKGQGKTRDDSADYIPHDIYVIGTQEDPLSEKEWLEILKHSLQEITSVTFKTVAIHTLWNIRIVVLAKPEHENRISHICTDNVKTGIANTLGNKGAVGVSFMFNGTSLGFVNSHLTSGSEKKLRRNQNYMNILRFLALGDKKLSPFNITHRFTHLFWFGDLNYRVDLPTWEAETIIQKIKQQQYADLLSHDQLLTERREQKVFLHFEEEEITFAPTYRFERLTRDKYAYTKQKATGMKYNLPSWCDRVLWKSYPLVHVVCQSYGSTSDIMTSDHSPVFATFEAGVTSQFVSKNGPGTVDSQGQIEFLRCYATLKTKSQTKFYLEFHSSCLESFVKSQEGENEEGSEGELVVKFGETLPKLKPIISDPEYLLDQHILISIKSSDSDESYGEGCIALRLEATETQLPIYTPLTHHGELTGHFQGEIKLQTSQGKTREKLYDFVKTERDESSGPKTLKSLTSHDPMKQWEVTSRAPPCSGSSITEIINPNYMGVGPFGPPMPLHVKQTLSPDQQPTAWSYDQPPKDSPLGPCRGESPPTPPGQPPISPKKFLPSTANRGLPPRTQESRPSDLGKNAGDTLPQEDLPLTKPEMFENPLYGSLSSFPKPAPRKDQESPKMPRKEPPPCPEPGILSPSIVLTKAQEADRGEGPGKQVPAPRLRSFTCSSSAEGRAAGGDKSQGKPKTPVSSQAPVPAKRPIKPSRSEINQQTPPTPTPRPPLPVKSPAVLHLQHSKGRDYRDNTELPHHGKHRPEEGPPGPLGRTAMQ

SEQ ID NO: 88 - DNA, 2756 bp, Human
agttcctgccagtgagtccctaggcctccatctctctcccttgctgtaccaccttcaccaccatccatgcgaccccaagagccttaatgactctagaagagactccaggcaggggaagctgaaaggacctttcactccctacttttggccagggccttctgtgccacctgccaagaccagcaggcctaccctctgaagaggtccaagcaacggaagtactactacgaagctgcctttctggccatccttgagaaaaatagacagatggccaaggagaggggcctaataagccccagtgattttgcccagctgcaaaaatacatggaatactccaccaaaaaggtcagtgatgtcctaaagctcttcgaggatggcgagatggctaaatatgtccaaggagatgccattgggtacgagggattccagcaattcctgaaaatctatctcgaagtggataatgttcccagacacctaagcctggcactgtttcaatcctttgagactggtcactgcttaaatgagacaaatgtgacaaaagatgtggtgtgtctcaatgatgtttcctgctacttttcccttctggagggtggtcggccagaagacaagttagaattcaccttcaagctgtacgacacggacagaaatgggatcctggacagctcagaagtggacaaaattatcctacagatgatgcgagtggctgaatacctggattgggatgtgtctgagctgaggccgattcttcaggagatgatgaaagagattgactatgatggcagtggctctgtctctcaagctgagtgggtccgggctggggccaccaccgtgccactgctagtgctgctgggtctggagatgactctgaaggacgacggacagcacatgtggaggcccaagaggttccccagaccagtctactgcaatctgtgcgagtcaagcattggtcttggcaaacagggactgagctgtaacctctgtaagtacactgttcacgaccagtgtgccatgaaagccctgccttgtgaagtcagcacctatgccaagtctcggaaggacattggtgtccaatcacatgtgtgggtgcgaggaggctgtgagtccgggcgctgcgaccgctgtcagaaaaagatccggatctaccacagtctgaccgggctgcattgtgtatggtgccacctagagatccacgatgactgcctgcaagcggtgggccatgagtgtgactgtgggctgctccgggatcacatcctgcctccatcttccatctatcccagtgtcctggcctctggaccggatcgtaaaaatagcaaaacaagccagaagaccatggatgatttaaatttgagcacctctgaggctctgcggattgaccctgttcctaacacccacccacttctcgtctttgtcaatcctaagagtggcgggaagcaggggcaaagggtgctctggaagttccagtatatattaaaccctcgacaggtgttcaacctcctaaaggatggtcctgagatagggctccgattattcaaggatgttcctgatagccggattttggtgtgtggtggagacggcacagtaggctggattctagagaccattgacaaagctaacttgccagttttgcctcctgttgctgtgttgcccctgggtactggaaatgatctggctcgatgcctaagatggggaggaggttatgaaggacagaatctggcaaagatcctcaaggatttagagatgagtaaagtggtacatatggatcgatggtctgtggaggtgatacctcaacaaactgaagaaaaaagtgacccagtcccctttcaaatcatcaataactacttctctattggcgtggatgcctctattgctcatcgattccacatcatgcgagagaaatatccggagaagttcaacagcagaatgaagaacaagctatggtacttcgaatttgccacatctgaatccatcttctcaacatgcaaaaagctggaggagtctttgacagttgagatctgtgggaaaccgctggatctgagcaacctgtccctagaaggcatcgcagtgctaaacatccctagcatgcatggtggctccaacctctggggtgataccaggagaccccatggggatatctatgggatcaaccaggccttaggtgctacagctaaagtcatcaccgaccctgatatcctgaaaacctgtgtaccagacctaagtgacaagagactggaagtggttgggctggagggtgcaattgagatgggccaaatctataccaagctcaagaatgctggacgtcggctggccaagtgctctgagatcaccttccacaccacaaaaacccttcccatgcaaattgacggagaaccctggatgcagacgccctgtacaatcaagatcacccacaagaaccagatgcccatgctcatgggcccacccccccgctccaccaatttctttggcttcttgagctaagggggacacccttggcctccaagccagccttgaacccacctccctgtccctggactctactcccgaggctctgtacattgctgccacatactcctgccagcttgggggagtgttccttcaccctcacagtatttattatcctgcaccacctcactgttccccatgcgcacacacatacacacaccccaaaacacatacattgaaagtgcctcatctgaataaaatgacttgtgtttcccctttgggatctgctaaaaaaaaaaaaaaaaaaaaaaaaaaaaaaa

SEQ ID NO: 89 - DNA, 4675 bp, Human
gctgtaacactcaccgtgaaggtctgcagcttcactcccgagccagcgagaccacgaacccaccagaaggaagaaactctgaacacatctgaacatcagaagggacagactccagacgcgccaccactctgctaacaccagatagtggaaagaaaccatgtgctgaaatgtttgacgacactgatggtttgactctgctaactggaatggcttattgtgcaagaaagtacacctggtcgggtcctggggctcatctctagcaccagcaaagatttctgaagacgtctttctagaaatgactggaaagtttcaagaggcataagatacagcatttcttctgaggccctgaagaagtatcaagtgggctttgacattgcggtggtgagagcgacccctcctcacctggagaactgggaaatgtggattctcagggaccgcgctgttcacgagctccaggctgtgctgctggccctggtcctggggcgctgagccgcatctgcaatagcacacttgcccggccacctgctgccgtgagcctttgctgctgaagcccctggggtcgcctctacctgatgaggatgtgcacccccattagggggctgctcatggcccttgcagtgatgtttgggacagcgatggcatttgcacccataccccggatcacctgggagcacagagaggtgcacctggtgcagtttcatgagccagacatctacaactactcagccttgctgctgagcgaggacaaggacaccttgtacataggtgcccgggaggcggtcttcgctgtgaacgcactcaacatctccgagaagcagcatgaggtgtattggaaggtctcagaagacaaaaaagcaaaatgtgcagaaaaggggaaatcaaaacagacagagtgcctcaactacatccgggtgctgcagccactcagcgccacttccctttacgtgtgtgggaccaacgcattccagccggcctgtgaccacctgaacttaacatcctttaagtttctggggaaaaatgaagatggcaaaggaagatgtccctttgacccagcacacagctacacatccgtcatggttgatggagaactttattcggggacgtcgtataattttttgggaagtgaacccatcatctcccgaaattcttcccacagtcctctgaggacagaatatgcaatcccttggctgaacgagcctagtttcgtgtttgctgacgtgatccgaaaaagcccagacagccccgacggcgaggatgacagggtctacttcttcttcacggaggtgtctgtggagtatgagtttgtgttcagggtgctgatcccacggatagcaagagtgtgcaagggggaccagggcggcctgaggaccttgcagaagaaatggacctccttcctgaaagcccgactcatctgctcccggccagacagcggcttggtcttcaatgtgctgcgggatgtcttcgtgctcaggtccccgggcctgaaggtgcctgtgttctatgcactcttcaccccacagctgaacaacgtggggctgtcggcagtgtgcgcctacaacctgtccacagccgaggaggtcttctcccacgggaagtacatgcagagcaccacagtggagcagtcccacaccaagtgggtgcgctataatggcccggtacccaagccgcggcctggagcgtgcatcgacagcgaggcacgggccgccaactacaccagctccttgaatttgccagacaagacgctgcagttcgttaaagaccaccctttgatggatgactcggtaaccccaatagacaacaggcccaggttaatcaagaaagatgtgaactacacccagatcgtggtggaccggacccaggccctggatgggactgtctatgatgtcatgtttgtcagcacagaccggggagctctgcacaaagccatcagcctcgagcacgctgttcacatcatcgaggagacccagctcttccaggactttgagccagtccagaccctgctgctgtcttcaaagaagggcaacaggtttgtctatgctggctctaactcgggcgtggtccaggccccgctggccttctgtgggaagcacggcacctgcgaggactgtgtgctggcgcgggacccctactgcgcctggagcccgcccacagcgacctgcgtggctctgcaccagaccgagagccccagcaggggtttgattcaggagatgagcggcgatgcttctgtgtgcccggataaaagtaaaggaagttaccggcagcattttttcaagcacggtggcacagcggaactgaaatgctcccaaaaatccaacctggcccgggtcttttggaagttccagaatgacgtgttgaaggccgagagccccaagtacggtcttatgggcagaaaaaacttgctcatcttcaacttgtcagaaggagacagtggggtgtaccagtgcctgtcagaggagagggttaagaacaaaacggtcttccaagtggtcgccaagcacgtcctggaagtgaaggtggttccaaagcccgtagtggcccccaccttgtcagttgttcagacagaaggtagtaggattgccaccaaagtgttggtggcatccacccaagggtcttctcccccaaccccagccgtgcaggccacctcctccggggccatcacccttcctcccaagcctgcgcccaccggcacatcctgcgaaccaaagatcgtcatcaacacggtcccccagctccactcggagaaaaccatgtatcttaagtccagcgacaaccgcctcctcatgtccctcttcctcttcttctttgttctcttcctctgcctctttttctacaactgctataagggatacctgcccagacagtgcttgaaattccgctcggccctactaattgggaagaagaagcccaagtcagatttctgtgaccgtgagcagagcctgaaggagacgttagtagagccagggagcttctcccagcagaatggggagcaccccaagccagccctggacaccggctatgagaccgagcaagacaccatcaccagcaaagtccccacggatagggaggactcacagaggatcgacgacctttctgccagggacaagccctttgacgtcaagtgtgagctgaagttcgctgactcagacgcagatggagactgaggccggctgtgcatccccgctggtgcctcggctgcgacgtgtccaggcgtggagagttttgtgtttctcctgttcagtatccgagtctcgtgcagtgctgcgtaggttagcccgcatcgtgcagacaacctcagtcctcttgtctattttctcttgggttgagcctgtgacttggtttctctttgtccttttggaaaaatgacaatccttgcatcccagtcttgtgttccgaagtcagtcggagtacttgaagaaggcccacgggcggcacggagttcctgagccctttctgtagtgggggaaaggtggctggacctctgttggctgagaagagcatcccttcagcttcccctccccgtagcagccactaaaagattatttaattccagattggaaatgacattttagtttatcagattggtaacttatcgcctgttgtccagattggcacgaaccttttcttccacttaattatttttttaggattttgctttgattgtgtttatgtcatgggtcatttttttttagttacagaagcagatgtgttaatatttagaagaagatgtatatcttccagattttgttatatatttggcataaaatacggcttacgttgcttaagattctcagggataaacttccttttgctaaatgcattctttctgcttttagaaatgtagacataaacactccccggagcccactcaccttttttctttttctttttttttttttaactttattccttgagggaagcattgtttttggagagattttctttctgtacttcgttttacttttctttttttttaacttttactctctcgaagaagaggaccttcccacatccacgaggtgggttttgagcaagggaaggtagcctggatgagctgagtggagccaggctggcccagagctgagatgggagtgcggtacaatctggagcccacagctgtcggtcagaacctcctgtgagacagatggaaccttcacaagggcgcctttggttctctgaacatctcctttctcttcttgcttcaattgcatacccactgcctgcccagactttctatccagcctcactgagctgcccactactggaagggaactgggcctcggtggccggggccgcgagctgtgaccacagcaccctcaagcatacggcgctgttcctgccactgtcctgaagatgtgaatgggtggtacgatttcaacactggttaatttcacactccatctccccgctttgtaaatacccatcgggaagagactttttttccatggtgaagagcaataaactctggatgtttgtgcgcgtgtgtggacagtcttatcttccagcatgataggatttgaccattttggtgtaaacatttgtgttttataagatttaccttgtttttatttttctactttgaattgtatacatttggaaagtacccaaataaatgagaagcttctatccttaaaaaaaaaaaaaaaaaaaaaaaaaaaaaaaaaaaaaaaaaaaaaaa

SEQ ID NO: 90 - DNA, 1550 bp, Human
tcaacgcctgcctcccctcgagcgtcctcagcgcagccgccgcccgcggagccagcacgaacgagcccagcaccggccggatggagcgtccgcaacccgacagcatgccccaggatttgtcagaggccctgaaggaggccaccaaggaggtgcacacccaggcagagaatgctgagttcatgaggaactttcagaagggccaggtgacccgagacggcttcaagctggtgatggcctccctgtaccacatctatgtggccctggaggaggagattgagcgcaacaaggagagcccagtcttcgcccctgtctacttcccagaagagctgcaccgcaaggctgccctggagcaggacctggccttctggtacgggccccgctggcaggaggtcatcccctacacaccagccatgcagcgctatgtgaagcggctccacgaggtggggcgcacagagcccgagctgctggtggcccacgcctacacccgctacctgggtgacctgtctgggggccaggtgctcaaaaagattgcccagaaagccctggacctgcccagctctggcgagggcctggccttcttcaccttccccaacattgccagtgccaccaagttcaagcagctctaccgctcccgcatgaactccctggagatgactcccgcagtcaggcagagggtgatagaagaggccaagactgcgttcctgctcaacatccagctctttgaggagttgcaggagctgctgacccatgacaccaaggaccagagcccctcacgggcaccagggcttcgccagcgggccagcaacaaagtgcaagattctgcccccgtggagactcccagagggaagcccccactcaacacccgctcccaggctccgcttctccgatgggtccttacactcagctttctggtggcgacagttgctgtagggctttatgccatgtgaatgcaggcatgctggctcccagggccatgaactttgtccggtggaaggccttctttctagagagggaattctcttggctggcttccttaccgtgggcactgaaggctttcagggcctccagccctctcactgtgtccctctctctggaaaggaggaaggagcctatggcatcttccccaacgaaaagcacatccaggcaatggcctaaacttcagagggggcgaaggggtcagccctgcccttcagcatcctcagttcctgcagcagagcctggaagacaccctaatgtggcagctgtctcaaacctccaaaagccctgagtttcaagtatccttgttgacacggccatgaccactttccccgtgggccatggcaatttttacacaaacctgaaaagatgttgtgtcttgtgtttttgtcttatttttgttggagccactctgttcctggctcagcctcaaatgcagtatttttgttgtgttctgttgtttttatagcagggttggggtggtttttgagccatgcgtgggtggggagggaggtgtttaacggcactgtggccttggtctaacttttgtgtgaaataataaacaacattgtctg

SEQ ID NO: 91 - protein, 288 aa, Human
MERPQPDSMPQDLSEALKEATKEVHTQAENAEFMRNFQKGQVTRDGFKLVMASLYHIYVALEEEIERNKESPVFAPVYFPEELHRKAALEQDLAFWYGPRWQEVIPYTPAMQRYVKRLHEVGRTEPELLVAHAYTRYLGDLSGGQVLKKIAQKALDLPSSGEGLAFFTFPNIASATKFKQLYRSRMNSLEMTPAVRQRVIEEAKTAFLLNIQLFEELQELLTHDTKDQSPSRAPGLRQRASNKVQDSAPVETPRGKPPLNTRSQAPLLRWVLTLSFLVATVAVGLYAM

SEQ ID NO: 92 - DNA, 2230 bp, Human
gcagcccactcttcccgagaggccccgacatctcccggataatctggagctttcaaaatgtttgccaaagcaaccaggaattttcttagagaagttgatgctgatggtgacctgattgcagtatcaaatctgaatgactctgataagttacagcttctaagtctggtgacaaaaaagaagagattctggtgctggcagagacccaagtaccagtttttatccctcacccttggcgatgtactcatagaagaccaatttccgagtccagtggtcgtggagtcggactttgtgaaatacgagggcaagtttgcaaaccacgtgagtggaaccctggagactgcactggggaaggtcaagctgaacctggggggcagcagccgcgtagagagccagtcttcatttggaaccctgaggaagcaggaggtggatttgcagcagctcatcagagactctgccgagagaacaataaatctgagaaaccctgtgctccagcaggtgctggaaggaaggaatgaggtcctgtgcgttttgacacagaagatcacgacgatgcagaagtgtgtgatctctgagcacatgcaggtcgaggagaagtgtggtggcatcgtgggcatccagaccaagacggtgcaggtgtcagcgacggaggatgggaatgtcaccaaggactccaacgtggtgctggagatcccagctgccaccaccattgcctacggtgtcattgagttatacgtgaaactggacggccagttcgagttctgccttctccgagggaagcaaggtggcttcgagaacaagaagagaattgactctgtctacctggaccccctggtctttcgagagtttgcattcatagacatgccagatgctgcgcatgggatatcttcccaggatggaccattaagtgttttaaagcaagcgaccctgctcctggagaggaatttccatccatttgcggagctgcctgagccacaacagacagctttgagtgacatcttccaggcggtcctatttgatgatgaactactcatggtcctggaaccagtgtgcgatgacctggtcagcggcctctcgcccacagtggcggtgctgggggagctgaagccccggcagcagcaggaccttgtggccttcctgcagctggtggggtgcagcttacagggtgggtgtccgggccccgaggatgcaggcagcaagcagctgtttatgacagcctacttcttggtcagtgccctcgcagaaatgccagatagcgcggcagctctgctgggcacttgctgcaaactccagatcattcccacactgtgccacttgcttcgtgctctgtctgatgatggagtatctgatcttgaagacccaaccttgactcccctgaaagatacagaaaggtttgggattgtgcagcgcttgtttgcctcagctgacattagtctggagagactgaagtcatctgtgaaagctgtcattctgaaggactctaaagtcttcccactgcttctttgtataaccctgaatggactctgtgctttaggcagagaacattcatgatgtcatatgtgaactagaagtacgtgttactggccaaggctatttttcagaactgttaaaggtcatatgcacgttaaaagttgaccaatgaaatgaatttacagaacagtttaagaagtggtgacattttgcatgatgaatgacctgacttttagccaccaggtactctttaaacagttttccttatcagaggccctcctgtgctggtgacccagcatctgagttaggttccagcatgtaaagagctgggagggcggagaattcttagcatacattcagacgttttttctgcacaataataagtccatctgtcacttgcattccactttttgttacatagaaagagtctgaccctttaatccaaaaggtctttttacattgtgaatgctgtgggaaggcaatttctctgcacacaagaggctacgttttggaagtgatgtatgttatttgatgactgaaaatgaactgtaaatgctcctagagtatattcctctgctgaacaaaattaaacttcaaaaaaatctaacagtaacacacccctgcttgggaccctagctatatgcattttatgtgaccttgccatgcttcagtgaacatactaattctatgtctagcacatgttgatttcctatgtattctgggtattctattaaaggaaactttgaactattaaaaaaaaaaa

SEQ ID NO: 93 - protein, 496 aa, Human
MFAKATRNFLREVDADGDLIAVSNLNDSDKLQLLSLVTKKKRFWCWQRPKYQFLSLTLGDVLIEDQFPSPVVVESDFVKYEGKFANHVSGTLETALGKVKLNLGGSSRVESQSSFGTLRKQEVDLQQLIRDSAERTINLRNPVLQQVLEGRNEVLCVLTQKITTMQKCVISEHMQVEEKCGGIVGIQTKTVQVSATEDGNVTKDSNVVLEIPAATTIAYGVIELYVKLDGQFEFCLLRGKQGGFENKKRIDSVYLDPLVFREFAFIDMPDAAHGISSQDGPLSVLKQATLLLERNFHPFAELPEPQQTALSDIFQAVLFDDELLMVLEPVCDDLVSGLSPTVAVLGELKPRQQQDLVAFLQLVGCSLQGGCPGPEDAGSKQLFMTAYFLVSALAEMPDSAAALLGTCCKLQIIPTLCHLLRALSDDGVSDLEDPTLTPLKDTERFGIVQRLFASADISLERLKSSVKAVILKDSKVFPLLLCITLNGLCALGREHS

SEQ ID NO: 94 - DNA, 6157 bp, Human
gagctgaggaactgcgtgtggagtcagcccagtctggatgcacaggaggatgctggcggcacagtgagtgaggcctggtgccagagctgtgcggaccccttgttggccatggagcagcaggcccagaggccctctccccagccctgcttgcctgcctcggagaggacagaggcctaggcccacgggggagggtgttggcagacagatgccctccaggccctggggcctccttaacggccccttaacgacacgcgtgccaagggtggaggatgccagccaaggggcgctacttcctcaacgagggcgaggagggccctgaccaagatgcgctctacgagaagtaccagctcaccagccagcatgggccgctgctgctcacgctcctgctggtggccgccactgcctgcgtggccctcatcatcattgccttcagccagggggacccctccagacaccaggccattctgggcatggcgttcctggtgctggcggtgtttgcggccctctctgtgctgatgtacgtcgagtgtctcctgcggcgctggctcagggccttggcgctgctcacctgggcctgcttggtggcgctgggctatgtgctggtgttcgacgcatggacaaaggcggcctgtgcgtgggagcaggtgcccttcttcctgttcattgtcttcgtggtgtacacactactgcccttcagcatgcggggcgctgtcgccgttggggccgtctccactgcctcccacctcctggtgctcggttctttgatgggaggcttcacgacacccagtgtccgggtggggctgcagctgctggccaacgcagtcatcttcctgtgtgggaacctgacaggcgccttccacaagcaccaaatgcaggatgcgtcccgggacctcttcacctacactgtgaagtgcatccagatccgccggaagctgcgcatcgagaagcgccagcaggagaacctgctgctgtcagtgcttccggcccacatctccatgggcatgaagctggccatcatcgaacggctcaaggagcatggtgaccgtcgctgcatgcctgacaacaacttccacagcctctacgtcaagaggcaccagaatgtcagcatcctctatgcggacatcgtgggcttcacgcagctggccagcgactgttctcccaaggagctggtggtggtgctgaatgagctctttggcaagttcgaccagatcgccaaggccaacgagtgcatgcgaatcaagatcctcggcgactgctactactgtgtatcgggcctgcccgtgtcgctgcctacccacgcccggaactgcgtgaagatggggctggacatgtgccaggccatcaagcaggtgcgggaggccacgggcgtggacatcaacatgcgtgtgggcatacactcggggaatgtgctgtgcggggtcatcgggctgcgcaagtggcagtatgacgtgtggtcccacgacgtgtccctggccaaccggatggaggcagccggagtacccggccgggtgcacatcacggaggccacgctaaagcacctggacaaggcgtacgaggtggaggatgggcacgggcagcagcgggacccctacctcaaggagatgaacatccgcacctacctggtcatcgacccccggagccagcagccacccccgcccagccaacacctccccaggcccaagggggacgcggccctgaagatgcgggcgtcagtgcgcatgacccggtacctcgagtcctggggggcggcacggccctttgcacatctcaaccaccgtgagagcgtgagcagtggtgagacccacgtccccaacgggcggaggcctaagagcgttccccagcgccaccgccggaccccagacagaagcatgtcccccaaggggcggtcggaggatgactcgtacgatgacgagatgctgtcagccattgaggggctcagctccacgaggccctgctgctccaagtccgatgacttctacacctttgggtccatcttcctggagaagggctttgagcgcgagtaccgcctggcacccatcccccgggcccgccacgactttgcctgcgccagcctgatcttcgtctgcatcctgctcgtccatgtcctgctcatgcccaggacggcggcactgggtgtgtccttcgggctggtggcctgtgtactggggctggtgctgggcctgtgctttgccaccaagttctcgaggtgctgcccagctcgggggacgctctgcactatctctgagagggtggagacacagcccctgctgaggctgaccctggccgtcctgaccatcggcagcctgctcactgtggccatcatcaacctgcccctgatgcctttccaagttccagagctgcctgttggcaatgagacaggcctactggccgcgagcagcaagacaagagccctgtgtgagcccctcccgtactacacctgcagctgtgtcctgggcttcatcgcctgctcggtcttcctgaggatgagcctggagccaaaggttgtgctgctgacagtggccctggtggcctacctggtgctcttcaacctctccccatgctggcagtgggactgctgcggccaaggcctgggcaacctcaccaagcccaacggcaccaccagtggcacccctagctgttcctggaaggacctgaagaccatgaccaatttctacctggtcctgttctacatcaccctgcttacactctccagacagattgactattactgccgcttggactgcctatggaagaagaagttcaagaaggagcacgaggagtttgagaccatggagaacgtgaaccgccttcttctggagaacgtcctgccagcccacgtggctgcccactttatcggtgacaagttaaacgaggactggtaccatcagtcctatgactgcgtctgtgtcatgtttgcctccgtgccggacttcaaagtgttctacacagagtgcgatgtcaacaaagaagggctggagtgcctacgcctgctcaatgagatcattgccgacttcgacgagctcctactgaagcccaagttcagcggcgtggagaagatcaagaccatcggcagcacgtacatggcagctgcagggctcagcgtcgcctcagggcacgagaaccaggagctggagcggcagcatgcccacattggtgtcatggtggagttcagcatcgccctgatgagtaagctggacggcatcaacaggcactccttcaactccttccgcctccgcgtcggcataaaccatgggcctgtgattgctggagtgattggggcccgaaaacctcagtatgacatctggggaaacactgtcaatgtggccagccgaatggaaagcactggagaacttgggaaaatccaggttaccgaggagacctgcaccatcctccagggcctcgggtactcttgtgaatgccgtggcctgatcaacgtcaaaggcaaaggcgagctgaggacttactttgtctgtacggacactgccaagtttcaggggctggggctgaactgagggctcctgctggattccgaaaaggccgggaagccagtctccttccctgaagcaagcccaggagaagactctccgccccacgccaatcccaaaggcatgcagatggctgtgcatgttggcttctttggacctgcactggaggatttctcagacacatgcaccagattctggctcgaagcagccactgagccataatgcgcaggggaggccagaagctctgtgcctggtctgtaacagtttccaggccagctggagaatgttcactggttcggggctgactttgagatctttgttccctgaggtgccaggcaggcaactttagcacatgatgaaaacagacttccacctcagtggcctgtgggcacgcacaagtgaggtctgtttttctagacaccaagggggagtaagctgagctgtctagcacggattggagactccctctccctggtgggcctggcaatgacagcatttctcacagaggcattctggtaaatgaagctgaaaggggtgttttacatctgtaaacggtttcaaacaggtagagagaaaaacaccacaattaacactgttactttttgccttgtctggcatgtttgttttaaatgaatacattaatggggtttttatccttttgaatgacttttcagacactagacataaatctcttccctccagtgtatgctctgcctttttaaccactgacatgtaaggaggactactgtctagcatcagcttatggggtcagctggctgtggggatagagtcctgaggaatgtggtcacagcaagaaggcggggagcagcagagccttgcctttgaatgaggcagcttgtgaggcaagcattctggagagaggtgctttgaaagtaaggtgcggcctttcacctcttccttgattactcacacatctttgcgttctcccctgccgtccttcaactgtatcttacttttcttaccagaaaggaatggagtctgtttagagacaacttggacaacctgtgagtgcatctcttctttcctttagtcttcacagctaactctggagagcttcaaaactagaaggatctactccgcatgggtgcatgcagaggctcctggatctgggaagcccgccccctcacaaatgctgagccgttcttgctctgaaactgcgtgagtcaaggcaaatgcaaaaagccaggttttggggatgtgtcttactgtgcttcaacttcccaaggaattgaaagtcaacctaactgtaacaacagggtgagaaatgaccaaactgcccgtgactttttctgaatggacttcataaccggaagacttaaccggtggcctcatcaccagagcatcgccaggatttctaatgcactcagtttccctacatagcagggattcttagctaggtgtccccatgaaccccgtaaagttctacacaaagtcttgcatacaggagcctttacaagatgattatacagggttgcagattgggtgactgaccagacttgttggggtcctgggatgagttgccccgggctgcaaattaagagtacagctaagtgcgggggtggcggtggagggaacgaaaattgaacctgtctgcctgtgctgtgtcgtgtggctttatcagcccgaggaagggcaggtgtattctaatttgcacaaaggtgctgggtagactagtggcagctctcatgtgctgcacataagtggaatcagtatgaatagaagaacttgctgtataaaggaatttcatggcaacaatgctggtaagggcaattagcctcgcttaagttgccttttttacacaccaaaactttttacatgaagggctggtttcacatgaatactatactgaaatctgtgctctcaagatctagcagtgaccagggctgcccggcgggggctctcctggcaagtcaggaaggtttctgttgctaatataacatagaaacacattagtgcactgggcctctctgaggtcagcatatttgtactcttggaatatttgtttttttcttcagtaacaacagaaaccccagttgggagtttaacaaataactgactaccactcactcatgcatttttatttccaattaaagcaaagcactgtgctgtgctcagataataatagtttgtaagtaaaagtttttagttttcagtgttcaggttatagaatataactgaccataaaaattacctgcaggtattttctttttatgaacttgtttttaaattaccaagtaattactggtgtcattttgttttatgacagacacacgtatctaacaaacaaacaaacagtgaccttctccatgggtcaaggacttccttacaatttctcctgagttaacttttgtgaaaataatacctaaggttttctggcttattgaggaaatttcctaacaaacaaacaaacaaacaaacagaagagaagatcattaaccactgtatactttgtgtatataataggtcagtgtaaagaaatatgatttgaggtggtgcatgcaagtaactagggtttattctatataatgaatatttatagatctgtaacatttgtttcaaaatgctgtttcatttttataaagtaccagtgtttagctgctttttatacattaaattagcaatttgaaaaactcaaaaaaaaaaaaaaaaaa

SEQ ID NO: 95 - DNA, 2907 bp, Human
gccatctgggcccaggccccatgccccgaggaggggtggtctgaagcccaccagagccccctgccagactgtctgcctcccttctgactgtggccgcttggcatggccagcaacagcagctcctgcccgacacctgggggcgggcacctcaatgggtacccggtgcctccctacgccttcttcttcccccctatgctgggtggactctccccgccaggcgctctgaccactctccagcaccagcttccagttagtggatatagcacaccatccccagccaccattgagacccagagcagcagttctgaagagatagtgcccagccctccctcgccaccccctctaccccgcatctacaagccttgctttgtctgtcaggacaagtcctcaggctaccactatggggtcagcgcctgtgagggctgcaagggcttcttccgccgcagcatccagaagaacatggtgtacacgtgtcaccgggacaagaactgcatcatcaacaaggtgacccggaaccgctgccagtactgccgactgcagaagtgctttgaagtgggcatgtccaaggagtctgtgagaaacgaccgaaacaagaagaagaaggaggtgcccaagcccgagtgctctgagagctacacgctgacgccggaggtgggggagctcattgagaaggtgcgcaaagcgcaccaggaaaccttccctgccctctgccagctgggcaaatacactacgaacaacagctcagaacaacgtgtctctctggacattgacctctgggacaagttcagtgaactctccaccaagtgcatcattaagactgtggagttcgccaagcagctgcccggcttcaccaccctcaccatcgccgaccagatcaccctcctcaaggctgcctgcctggacatcctgatcctgcggatctgcacgcggtacacgcccgagcaggacaccatgaccttctcggacgggctgaccctgaaccggacccagatgcacaacgctggcttcggccccctcaccgacctggtctttgccttcgccaaccagctgctgcccctggagatggatgatgcggagacggggctgctcagcgccatctgcctcatctgcggagaccgccaggacctggagcagccggaccgggtggacatgctgcaggagccgctgctggaggcgctaaaggtctacgtgcggaagcggaggcccagccgcccccacatgttccccaagatgctaatgaagattactgacctgcgaagcatcagcgccaagggggctgagcgggtgatcacgctgaagatggagatcccgggctccatgccgcctctcatccaggaaatgttggagaactcagagggcctggacactctgagcggacagccggggggtggggggcgggacgggggtggcctggcccccccgccaggcagctgtagccccagcctcagccccagctccaacagaagcagcccggccacccactccccgtgaccgcccacgccacatggacacagccctcgccctccgccccggcttttctctgcctttctaccgaccatgtgaccccgcaccagccctgcccccacctgccctcccgggcagtactggggaccttccctgggggacggggagggaggaggcagcgactccttggacagaggcctgggccctcagtggactgcctgctcccacagcctgggctgacgtcagaggccgaggccaggaactgagtgaggcccctggtcctgggtctcaggatgggtcctgggggcctcgtgttcatcaagacacccctctgcccagctcaccacatcttcatcaccagcaaacgccaggacttggctcccccatcctcagaactcacaagccattgctccccagctggggaacctcaacctcccccctgcctcggttggtgacagagggggtgggacaggggcggggggttccccctgtacataccctgccataccaaccccaggtattaattctcgctggttttgtttttattttaatttttttgttttgatttttttaataagaattttcattttaagcacatttatactgaaggaatttgtgctgtgtattggggggagctggatccagagctggagggggtgggtccgggggagggagtggctcggaaggggcccccactctcctttcatgtccctgtgccccccagttctcctcctcagccttttcctcctcagttttctctttaaaactgtgaagtactaactttccaaggcctgccttcccctccctcccactggagaagccgccagcccctttctccctctgcctgaccactgggtgtggacggtgtggggcagccctgaaaggacaggctcctggccttggcacttgcctgcacccaccatgaggcatggagcagggcagagcaagggccccgggacagagttttcccagacctggctcctcggcagagctgcctcccgtcagggcccacatcatctaggctccccagcccccactgtgaaggggctggccaggggcccgagctgcccccacccccggcctcagccaccagcacccccatagggcccccagacaccacacacatgcgcgtgcgcacacacacaaacacacacacactggacagtagatgggccgacacacacttggcccgagttcctccatttccctggcctgccccccacccccaacctgtcccacccccgtgccccctccttaccccgcaggacgggcctacaggggggtctcccctcacccctgcacccccagctgggggagctggctctgccccgacctccttcaccaggggttggggccccttcccctggagcccgtgggtgcacctgttactgttgggctttccactgagatctactggataaagaataaagttctatttattct

SEQ ID NO: 96 - protein, 462 aa, Human
MASNSSSCPTPGGGHLNGYPVPPYAFFFPPMLGGLSPPGALTTLQHQLPVSGYSTPSPATIETQSSSSEEIVPSPPSPPPLPRIYKPCFVCQDKSSGYHYGVSACEGCKGFFRRSIQKNMVYTCHRDKNCIINKVTRNRCQYCRLQKCFEVGMSKESVRNDRNKKKKEVPKPECSESYTLTPEVGELIEKVRKAHQETFPALCQLGKYTTNNSSEQRVSLDIDLWDKFSELSTKCIIKTVEFAKQLPGFTTLTIADQITLLKAACLDILILRICTRYTPEQDTMTFSDGLTLNRTQMHNAGFGPLTDLVFAFANQLLPLEMDDAETGLLSAICLICGDRQDLEQPDRVDMLQEPLLEALKVYVRKRRPSRPHMFPKMLMKITDLRSISAKGAERVITLKMEIPGSMPPLIQEMLENSEGLDTLSGQPGGGGRDGGGLAPPPGSCSPSLSPSSNRSSPATHSP

SEQ ID NO: 97 - DNA, 1642 bp, Human
tttcagcctcacctgcagctgcgcctccttgcacctgcgcctgtgctttttctcccagcactgcggacgcgactcgagggtgacgctcgctccgctcgtcccgctcgtcatggcctacccgggatacggaggagggtttggaaattttagcattcaggtgccaggaatgcagatgggacagccagtgccagaaacaggcccagctatactcctcgatggatactctgggccagcatattcagacacttattcctcagctggtgactccgtgtatacttacttcagtgctgttgctggacaggatggtgaagtggatgctgaagaacttcagagatgtttgacacagtctggaattaatggaacttactctcccttcagtttggaaacctgcagaattatgattgccatgttggatagagatcacacaggaaaaatgggatttaatgcattcaaagagctatgggcagctcttaatgcctggaaggaaaacttcatgactgttgatcaagatggaagtggcacagtagaacatcatgagttgcgtcaagccattggtcttatgggttataggttgagtcctcaaacattaactactattgttaaacgttatagcaagaatggcagaattttctttgatgattatgttgcttgctgtgtgaagcttcgagcattgacagatttctttaggaaaagagaccacttgcaacaagggtctgcgaatttcatatatgacgattttttgcagggcactatggcaatttgaatgcttagaattttaaacctgaagagacactgtgaattcttttgtttggaagaagtgaactggactactttaaaacttttaagggttttctatgttcttcctacctgttaaacctcttccctttctgtgtgtttttattttagcagatagttcaaagcaataaaagatttcttttttaatttgaggtattactgcttttggaaaagttattttataaatatgtgcatattgtcataaaatattgtatgattaattgatttaaataatgcttagccttaattttagataatgtaaatttagaggaatgtactttacaagatagattgtataagaagccaaataatgaaagcctagggaaaaaactaatttatacttatctgaaggttacaaattagacttttaaattttctttgtagttggtggtgtttgagggttggctagaaatgaaagcctggattttgtgccatgtttgtaatatagtttgttccttgatcaaataatcagagaaaagaaacttaaagatctttgtctgtgaagaagaaaattatctccctagttcaatctgtagtgaaataagactacagaaggcattgttttttccttttttattttttgtattatatatttttcttaaatatgttttattgtcttctctaagcaaaaagttcttaataaacatagtatttctctctgcgtcctatttcattagtgaagacatagttcacctaaaatggcatcctgctctgaatctagactttttagaaatggcatatgtttttgatgatatgtcaacattcaaaattgtcctaattaaattgttgtttaaatgtaatgtcaactctttataaacttaaaaataaacaagtaattaaccactca

SEQ ID NO: 98 - protein, 217 aa, Human
MAYPGYGGGFGNFSIQVPGMQMGQPVPETGPAILLDGYSGPAYSDTYSSAGDSVYTYFSAVAGQDGEVDAEELQRCLTQSGINGTYSPFSLETCRIMIAMLDRDHTGKMGFNAFKELWAALNAWKENFMTVDQDGSGTVEHHELRQAIGLMGYRLSPQTLTTIVKRYSKNGRIFFDDYVACCVKLRALTDFFRKRDHLQQGSANFIYDDFLQGTMAI

SEQ ID NO: 99 - DNA, 2360 bp, Human
gctacgcgggccacgctgctggctggcctgacctaggcgcgcggggtcgggcggccgcgcgggcgggctgagtgagcaagacaagacactcaagaagagcgagctgcgcctgggtcccggccaggcttgcacgcagaggcgggcggcagacggtgcccggcggaatctcctgagctccgccgcccagctctggtgccagcgcccagtggccgccgcttcgaaagtgactggtgcctcgccgcctcctctcggtgcgggaccatgaagctgctgccgtcggtggtgctgaagctctttctggctgcagttctctcggcactggtgactggcgagagcctggagcggcttcggagagggctagctgctggaaccagcaacccggaccctcccactgtatccacggaccagctgctacccctaggaggcggccgggaccggaaagtccgtgacttgcaagaggcagatctggaccttttgagagtcactttatcctccaagccacaagcactggccacaccaaacaaggaggagcacgggaaaagaaagaagaaaggcaaggggctagggaagaagagggacccatgtcttcggaaatacaaggacttctgcatccatggagaatgcaaatatgtgaaggagctccgggctccctcctgcatctgccacccgggttaccatggagagaggtgtcatgggctgagcctcccagtggaaaatcgcttatatacctatgaccacacaaccatcctggccgtggtggctgtggtgctgtcatctgtctgtctgctggtcatcgtggggcttctcatgtttaggtaccataggagaggaggttatgatgtggaaaatgaagagaaagtgaagttgggcatgactaattcccactgagagagacttgtgctcaaggaatcggctggggactgctacctctgagaagacacaaggtgatttcagactgcagaggggaaagacttccatctagtcacaaagactccttcgtccccagttgccgtctaggattgggcctcccataattgctttgccaaaataccagagccttcaagtgccaaacagagtatgtccgatggtatctgggtaagaagaaagcaaaagcaagggaccttcatgcccttctgattcccctccaccaaaccccacttcccctcataagtttgtttaaacacttatcttctggattagaatgccggttaaattccatatgctccaggatctttgactgaaaaaaaaaaagaagaagaagaaggagagcaagaaggaaagatttgtgaactggaagaaagcaacaaagattgagaagccatgtactcaagtaccaccaagggatctgccattgggaccctccagtgctggatttgatgagttaactgtgaaataccacaagcctgagaactgaattttgggacttctacccagatggaaaaataacaactatttttgttgttgttgtttgtaaatgcctcttaaattatatatttattttattctatgtatgttaatttatttagtttttaacaatctaacaataatatttcaagtgcctagactgttactttggcaatttcctggccctccactcctcatccccacaatctggcttagtgccacccacctttgccacaaagctaggatggttctgtgacccatctgtagtaatttattgtctgtctacatttctgcagatcttccgtggtcagagtgccactgcgggagctctgtatggtcaggatgtaggggttaacttggtcagagccactctatgagttggacttcagtcttgcctaggcgattttgtctaccatttgtgttttgaaagcccaaggtgctgatgtcaaagtgtaacagatatcagtgtctccccgtgtcctctccctgccaagtctcagaagaggttgggcttccatgcctgtagctttcctggtccctcacccccatggccccaggccacagcgtgggaactcactttcccttgtgtcaagacatttctctaactcctgccattcttctggtgctactccatgcaggggtcagtgcagcagaggacagtctggagaaggtattagcaaagcaaaaggctgagaaggaacagggaacattggagctgactgttcttggtaactgattacctgccaattgctaccgagaaggttggaggtggggaaggctttgtataatcccacccacctcaccaaaacgatgaaggtatgctgtcatggtcctttctggaagtttctggtgccatttctgaactgttacaacttgtatttccaaacctggttcatatttatactttgcaatccaaataaagataacccttattccataaaaaaaaaaaaaaaaaa

SEQ ID NO: 100 - protein, 208 aa, Human
MKLLPSVVLKLFLAAVLSALVTGESLERLRRGLAAGTSNPDPPTVSTDQLLPLGGGRDRKVRDLQEADLDLLRVTLSSKPQALATPNKEEHGKRKKKGKGLGKKRDPCLRKYKDFCIHGECKYVKELRAPSCICHPGYHGERCHGLSLPVENRLYTYDHTTILAVVAVVLSSVCLLVIVGLLMFRYHRRGGYDVENEEKVKLGMTNSH

SEQ ID NO: 101 - DNA, 4266 bp, Human
cttcctctgccaccatggggaactgggctgtgaatgaggggctctccatttttgtcattctggtttggctggggttgaacgtcttcctctttgtctggtattaccgggtttatgatattccacctaagttcttttacacaagaaaacttcttgggtcagcactggcactggccagggcccctgcagcctgcctgaatttcaactgcatgctgattctcttgccagtctgtcgaaatctgctgtccttcctcaggggttccagtgcgtgctgctcaacaagagttcgaagacaactggacaggaatctcacctttcataaaatggtggcatggatgattgcacttcactctgcgattcacaccattgcacatctatttaatgtggaatggtgtgtgaatgcccgagtcaataattctgatccttattcagtagcactctctgaacttggagacaggcaaaatgaaagttatctcaattttgctcgaaagagaataaagaaccctgaaggaggcctgtacctggctgtgaccctgttggcaggcatcactggagttgtcatcacgctgtgcctcatattaattatcacttcctccaccaaaaccatccggaggtcttactttgaagtcttttggtacacacatcatctctttgtgatcttcttcattggccttgccatccatggagctgaacgaattgtacgtgggcagaccgcagagagtttggctgtgcataatataacagtttgtgaacaaaaaatctcagaatggggaaaaataaaggaatgcccaatccctcagtttgctggaaaccctcctatgacttggaaatggatagtgggtcccatgtttctgtatctctgtgagaggttggtgcggttttggcgatctcaacagaaggtggtcatcaccaaggtggtcactcaccctttcaaaaccatcgagctacagatgaagaagaaggggttcaaaatggaagtgggacaatacatttttgtcaagtgcccaaaggtgtccaagctggagtggcacccttttacactgacatccgcccctgaggaagacttctttagtatccatatccgcatcgttggggactggacagaggggctgttcaatgcttgtggctgtgataagcaggagtttcaagatgcgtggaaactacctaagatagcggttgatgggccctttggcactgccagtgaagatgtgttcagctatgaggtggtgatgttagtgggagcagggattggggtcacacccttcgcatccattctcaagtcagtctggtacaaatattgcaataacgccaccaatctgaagctcaaaaagatctacttctactggctgtgccgggacacacatgcctttgagtggtttgcagatctgctgcaactgctggagagccagatgcaggaaaggaacaatgccggcttcctcagctacaacatctacctcactggctgggatgagtctcaggccaatcactttgctgtgcaccatgatgaggagaaagatgtgatcacaggcctgaaacaaaagactttgtatggacggcccaactgggataatgaattcaagacaattgcaagtcaacaccctaataccagaataggagttttcctctgtggacctgaagccttggctgaaaccctgagtaaacaaagcatctccaactctgagtctggccctcggggagtgcatttcattttcaacaaggaaaacttctaacttgtctcttccatgaggaaataaatgtgggttgtgctgccaaatgctcaaataatgctaattgataatataaataccccctgcttaaaaatggacaaaaagaaactataatgtaatggttttcccttaaaggaatgtcaaagattgtttgatagtgataagttacatttatgtggagctctatggttttgagagcacttttacaaacattatttcatttttttcctctcagtaatgtcagtggaagttagggaaaagattcttggactcaattttagaatcaaaagggaaaggatcaaaaggttcagtaacttccctaagattatgaaactgtgaccagatctagcccatcttactccaggtttgatactctttccacaatactgagctgcctcagaatcctcaaaatcagtttttatattccccaaaagaagaaggaaaccaaggagtagctatatatttctactttgtgtcatttttgccatcattattatcatactgaaggaaattttccagatcattaggacataatacatgttgagagtgtctcaacacttattagtgacagtattgacatctgagcatactccagtttactaatacagcagggtaactgggccagatgttctttctacagaagaatattggattgattggagttaatgtaatactcatcatttaccactgtgcttggcagagagcggatactcaagtaagttttgttaaatgaatgaatgaatttagaaccacacaatgccaagatagaattaatttaaagccttaaacaaaatttatctaaagaaataacttctattactgtcatagaccaaaggaatctgattctccctagggtcaagaacaggctaaggatactaaccaataggattgcctgaagggttctgcacattcttatttgaagcatgaaaaaagagggttggaggtggagaattaacctcctgccatgactctggctcatctagtcctgctccttgtgctataaaataaatgcagactaatttcctgcccaaagtggtcttctccagctagcccttatgaatattgaacttaggaattgtgacaaatatgtatctgatatggtcatttgttttaaataacacccaccccttattttccgtaaatacacacacaaaatggatcgcatctgtgtgactaatggtttatttgtattatatcatcatcatcatcctaaaattaacaacccagaaacaaaaatctctatacagagatcaaattcacactcaatagtatgttctgaatatatgttcaagagagagtctctaaatcactgttagtgtggccaagagcagggttttctttttgttcttagaactgctcccatttctgggaactaaaaccagttttatttgccccaccccttggagccacaaatgtttagaactcttcaacttcggtaatgaggaagaaggagaaagagctgggggaagggcagaagactggtttaggaggaaaaggaaataaggagaaaagagaatgggagagtgagagaaaataaaaaaggcaaaagggagagagaggggaagggggtctcatattggtcattccctgccccagatttcttaaagtttgatatgtatagaatataattgaaggaggtatacacatactgatgttgttttgattatctatggtattgaatcttttaaaatctggtcacaaattttgatgctgagggggattattcaagggactaggatgaactaaataagaactcagttgttctttgtcatactactattcctttcgtctcccagaatcctcagggcactgagggtaggtctgacaaataaggcctgctgtgcgaatatagcctttctgaaatgtaccaggatggtttctgcttagagacacttaggtccagcctgttcacactgcacctcaggtatcaattcatctattcaacagatatttattgtgttattactatgagtcaggctctgtttattgtttcaattctttacaccaaagtatgaactggagagggtacctcagttataaggagtctgagaatattggccctttctaacctatgtgcataattaaaaccagcttcatttgttgctccgagagtgtttctccaaggttttctatcttcaaaaccaactaagttatgaaagtagagagatctgccctgtgttatccagttatgagataaaaaatgaatataagagtgcttgtcattataaaagtttcctttttatctctcaagccaccagctgccagccaccacgagccagctgccagcctagctttttttttttttttttttttagcacttagtatttagcatttattaacaggtactctaagaatgatgaagcattgtttttaatcttaagactatgaaggtttttcttagttcttctgcttttgcaattgtgtttgtgaaatttgaatacttgcaggctttgtatgtgaataattctagcgggggacctgggagataattctacggggaattcttaaaactgtgctcaactattaaaatgaatgagctttc

SEQ ID NO: 102 - protein, 570 aa, Human
MGNWAVNEGLSIFVILVWLGLNVFLFVWYYRVYDIPPKFFYTRKLLGSALALARAPAACLNFNCMLILLPVCRNLLSFLRGSSACCSTRVRRQLDRNLTFHKMVAWMIALHSAIHTIAHLFNVEWCVNARVNNSDPYSVALSELGDRQNESYLNFARKRIKNPEGGLYLAVTLLAGITGVVITLCLILIITSSTKTIRRSYFEVFWYTHHLFVIFFIGLAIHGAERIVRGQTAESLAVHNITVCEQKISEWGKIKECPIPQFAGNPPMTWKWIVGPMFLYLCERLVRFWRSQQKVVITKVVTHPFKTIELQMKKKGFKMEVGQYIFVKCPKVSKLEWHPFTLTSAPEEDFFSIHIRIVGDWTEGLFNACGCDKQEFQDAWKLPKIAVDGPFGTASEDVFSYEVVMLVGAGIGVTPFASILKSVWYKYCNNATNLKLKKIYFYWLCRDTHAFEWFADLLQLLESQMQERNNAGFLSYNIYLTGWDESQANHFAVHHDEEKDVITGLKQKTLYGRPNWDNEFKTIASQHPNTRIGVFLCGPEALAETLSKQSISNSESGPRGVHFIFNKENF

SEQ ID NO: 103 - DNA, 2334 bp, Human
agacacctctgccctcaccatgagcctctggcagcccctggtcctggtgctcctggtgctgggctgctgctttgctgcccccagacagcgccagtccacccttgtgctcttccctggagacctgagaaccaatctcaccgacaggcagctggcagaggaatacctgtaccgctatggttacactcgggtggcagagatgcgtggagagtcgaaatctctggggcctgcgctgctgcttctccagaagcaactgtccctgcccgagaccggtgagctggatagcgccacgctgaaggccatgcgaaccccacggtgcggggtcccagacctgggcagattccaaacctttgagggcgacctcaagtggcaccaccacaacatcacctattggatccaaaactactcggaagacttgccgcgggcggtgattgacgacgcctttgcccgcgccttcgcactgtggagcgcggtgacgccgctcaccttcactcgcgtgtacagccgggacgcagacatcgtcatccagtttggtgtcgcggagcacggagacgggtatcccttcgacgggaaggacgggctcctggcacacgcctttcctcctggccccggcattcagggagacgcccatttcgacgatgacgagttgtggtccctgggcaagggcgtcgtggttccaactcggtttggaaacgcagatggcgcggcctgccacttccccttcatcttcgagggccgctcctactctgcctgcaccaccgacggtcgctccgacggcttgccctggtgcagtaccacggccaactacgacaccgacgaccggtttggcttctgccccagcgagagactctacacccgggacggcaatgctgatgggaaaccctgccagtttccattcatcttccaaggccaatcctactccgcctgcaccacggacggtcgctccgacggctaccgctggtgcgccaccaccgccaactacgaccgggacaagctcttcggcttctgcccgacccgagctgactcgacggtgatggggggcaactcggcgggggagctgtgcgtcttccccttcactttcctgggtaaggagtactcgacctgtaccagcgagggccgcggagatgggcgcctctggtgcgctaccacctcgaactttgacagcgacaagaagtggggcttctgcccggaccaaggatacagtttgttcctcgtggcggcgcatgagttcggccacgcgctgggcttagatcattcctcagtgccggaggcgctcatgtaccctatgtaccgcttcactgaggggccccccttgcataaggacgacgtgaatggcatccggcacctctatggtcctcgccctgaacctgagccacggcctccaaccaccaccacaccgcagcccacggctcccccgacggtctgccccaccggaccccccactgtccacccctcagagcgccccacagctggccccacaggtcccccctcagctggccccacaggtccccccactgctggcccttctacggccactactgtgcctttgagtccggtggacgatgcctgcaacgtgaacatcttcgacgccatcgcggagattgggaaccagctgtatttgttcaaggatgggaagtactggcgattctctgagggcagggggagccggccgcagggccccttccttatcgccgacaagtggcccgcgctgccccgcaagctggactcggtctttgaggagccgctctccaagaagcttttcttcttctctgggcgccaggtgtgggtgtacacaggcgcgtcggtgctgggcccgaggcgtctggacaagctgggcctgggagccgacgtggcccaggtgaccggggccctccggagtggcagggggaagatgctgctgttcagcgggcggcgcctctggaggttcgacgtgaaggcgcagatggtggatccccggagcgccagcgaggtggaccggatgttccccggggtgcctttggacacgcacgacgtcttccagtaccgagagaaagcctatttctgccaggaccgcttctactggcgcgtgagttcccggagtgagttgaaccaggtggaccaagtgggctacgtgacctatgacatcctgcagtgccctgaggactagggctcccgtcctgctttgcagtgccatgtaaatccccactgggaccaaccctggggaaggagccagtttgccggatacaaactggtattctgttctggaggaaagggaggagtggaggtgggctgggccctctcttctcacctttgttttttgttggagtgtttctaataaacttggattctctaaccttt

SEQ ID NO: 104 - protein, 707 aa, Human
MSLWQPLVLVLLVLGCCFAAPRQRQSTLVLFPGDLRTNLTDRQLAEEYLYRYGYTRVAEMRGESKSLGPALLLLQKQLSLPETGELDSATLKAMRTPRCGVPDLGRFQTFEGDLKWHHHNITYWIQNYSEDLPRAVIDDAFARAFALWSAVTPLTFTRVYSRDADIVIQFGVAEHGDGYPFDGKDGLLAHAFPPGPGIQGDAHFDDDELWSLGKGVVVPTRFGNADGAACHFPFIFEGRSYSACTTDGRSDGLPWCSTTANYDTDDRFGFCPSERLYTRDGNADGKPCQFPFIFQGQSYSACTTDGRSDGYRWCATTANYDRDKLFGFCPTRADSTVMGGNSAGELCVFPFTFLGKEYSTCTSEGRGDGRLWCATTSNFDSDKKWGFCPDQGYSLFLVAAHEFGHALGLDHSSVPEALMYPMYRFTEGPPLHKDDVNGIRHLYGPRPEPEPRPPTTTTPQPTAPPTVCPTGPPTVHPSERPTAGPTGPPSAGPTGPPTAGPSTATTVPLSPVDDACNVNIFDAIAEIGNQLYLFKDGKYWRFSEGRGSRPQGPFLIADKWPALPRKLDSVFEEPLSKKLFFFSGRQVWVYTGASVLGPRRLDKLGLGADVAQVTGALRSGRGKMLLFSGRRLWRFDVKAQMVDPRSASEVDRMFPGVPLDTHDVFQYREKAYFCQDRFYWRVSSRSELNQVDQVGYVTYDILQCPED

SEQ ID NO: 105 - DNA, 4735 bp, Human
agaagtggaggggccgttcgaagagtcgtgagggggtgacgggttaagattcggagagagaggtgctagtggctggacttgacctggaaggaatcttctgctgactctcaacttttcctggaaaaaatggatcattcccaccatatggggatgagctatatggactccaacagtaccatgcaaccttctcaccatcacccaaccacttcagcctcacactcccatggtggaggagacagcagcatgatgatgatgcctatgaccttctactttggctttaagaatgtggaactactgttttccggtttggtgatcaatacagctggagaaatggctggagcttttgtggcagtgtttttactagcaatgttctatgaaggactcaagatagcccgagagagcctgctgcgtaagtcacaagtcagcattcgctacaattccatgcctgtcccaggaccaaatggaaccatccttatggagacacacaaaactgttgggcaacagatgctgagctttcctcacctcctgcaaacagtgctgcacatcatccaggtggtcataagctacttcctcatgctcatcttcatgacctacaacgggtacctctgcattgcagtagcagcaggggccggtacaggatacttcctcttcagctggaagaaggcagtggtagtggatatcacagagcattgccattgacatcaaactctatggcgtggccttatcgattgcagtgggaagttgttgaagacttgaagacgtgattcctgctccaatcatcccttcttgctcctctttgtgcacgtacacacacacacacacacacacacacacacacccctgctcaacagaggtttagtttacagtctctgaactaaagtagtaacctcccaaattgttttttctaataagctgagattcccatttctcttaaggagaagccacccatgagatgtcttttccttctccatcatcttagagccaagttatatgttcttgtctaatccatgtagctttttgttcaatgacttgatcatctgcttcctttttgaatttttaacagatagtaagtaaatttggtggttttttcccctgggtcagtgatggaaaggggttaacttcagccaggattgatggcagctgagggaaattcttgcccaactaaacccagaactcaaacttaacattagaaaataaggtccagggccggacacagtggcccatgcctgtaatcccagcactttggggggccaaggcaggctggatcacctgaggacaggagttcgagaccagtctggccaacatggggaaaccccgtctctactaaaaatacaaaaattagccgggcatggtggtgggcgcctgtaatcccagctactcagaaggctgaggcaggagaatcacttgaacctaggaggcggaggttgcagtgagccaagatggcgccattgcactccagcctgggtgacaagagtgaaactccatctcaaaaaaaaagaaaagaaggtccagcttttggattcaatgagtgggaaatacattgtgcctttctctagatgtgatacgttataccaaaatctttgtagtgtgcagagcggtggtttgagactaaatacaggcttagaacttgcagagtgtgtattcttggatggctgatgcatcgacttgcattcccacttaacactctgattagcatgaacttgccaatcaaaaaatgacaatcaatttgagaaaatagaaatagatatttttaaataaaaccattcacagtttactttgtcttgataccttggtttgtcccagctgaagtgaagcaagagagtttgaattaatttttccattataatgttttcgcatgtctgcctctaaaactgtgattttcaagctttagcgtgcatcagaaccacctgtagggcttgttaaaacactaattgctgggcctcaacccaaaagcccccaaagtggcacttctgagttcctgctgatgttacaagggaccacacttttgagaatctgtgctttaagctaaggaaatattgcctggtgggttggctgcctggtattgggcatggaaatttgaattgctgattggtagatggtgtgtctggacctaactcacgtagtaaatactgctgatcaatacctaatcattccacatttattgagctccacctgtgtgtatgtgtacccaagcacacatgtgtgaagggctatagccaaagtatttttactagcctgtatgaaatcactagtccttatttttaaaggtctatggtttcttggaagtagtttgattgttgagagagacctttgatctgcagtgtaaatctaccagtcatgggccagaagggcaaaagcccagctttctctttggaaagactcaggctgtggtttgttgatggccaggttttcctcaggctccaacaactgtgcttataccaagcagatcctcatcctccatataatcatctttgttattcgtgggggtttaattacattacaagtggccaaaacccctgttctcagtgaagaaccacattggatttgtattctgttcagttgtagtctacactgcagtcttattcctggttcaaactacctctttaaattgatttgtcttgtgctggtctgttaaatcctgccctccttggtgctagatccagttgtgcctcagggcagaggaaacaaaacacagctatcctgttggcctgtgttgtggttttgaagtttgtactttctctgtgggtgccagttaaatattggagagcaaggaatgtggacttgtatggctttgaaccaagagagggttatgagcctactggattgaggttaaaatccaagaaccaacatttagagctttgtgcttttctctcattccatcactttgtaatgatgatacttaacatgagcagggtgaatgacaggtactgacgaagtccaacacaaaggtataatacagcctgttgtctaaagccaaggagtcataaaaccatgagaaataaataggaatcaatagttagtagtgacattggtgctctctagaaatctcagcatgagctgctatagaataccctcccagcaacaaaacctaatcagtaaggccagctagacccaatggctcatgcctgtaatcccaacactttgggaggccaaggtgggaggatggcttgtgtccagaagttcgagaccagcctggacaacatagtgagatcctatctctataaaaaatcaaaaattagccaggcatggtggtgcatacctatagtcctggctatttgggaggctgaggcaggaggattgctttagccctggaggtcgaggctgcagtaagccatgattgcgccactgcactcagcccgggtgacaaagcaagaccctgtctcagaaaaaaagaaaattcaaggccagttaagacagaatgctatgactttgaaattcacagaaagaaataacagtttagattaggtcttcaggtattcaggatagagataatctcctgaaaaacctgaatttcagagattcttagactggctgccaaaggatgaagctagtgaaggagaaaaagcttaaattccatcttgagctcttggattgtgataatacaatgatttcattaacttttcatttctgtatacctgttcatttggaatttaatgcttgacttctttgttcattttggatctaaacttctcttttcttccttccccattcacatctattagaagactgcaccaccatttctttggcccccttactctgttgtcctttcccttttctttcagtttttttaatcgcatgtctagtatattaagtctccatagccctcctgatgcagtagacagtgctatgctgtggatataataccaaccagaaattggcatttataaacctgttaagagactttaagcatgtttcaagaggcagttgccccactggaatttctataaggctggtacccttcccagagttacagaatcttgggtgctatctctagtctgtgagggaggaactcccagcatccccattgcccacaaatgggatcctcactgtatccactaggagattagaaattaaggtttcttcactacttctatggtagggttgtctgaaattccctttcaggctgtgggtactggtcttgggttctagtcataaggggttccttataaggagcaggcggaggggagtacactttcatgtgatttaattttgatcctgccctctccagctgctccttcaaaagaaacatcaaaagatagaaactctgggctgggcacagtggctcacacactttgggaggccaagcgggggtgcagatcacctgaggtcaggagtttgagaccagcctggccaatgtggtgaaaccccatctctactaaaaatacaaaaattagctgggcgtggtggtgcatgcctgtaatcccagctactcgggaggctgaggcaggagaatcgcttgaacccaggaggcggaggttgcagtgagccaagatggcgccattgcactccagcctgggcgacaagagcaaaactccgtctcaaaaaaaaaaaagatacaaagtctgcatttgatataatgccttaattactgggtctacaattaatgttgactgttttagattgtaagctcctggagagcagtattgctgtagtaggaatgttttaacagtgtcatatgaaaaagaacaaaataaatattttgattttgtgattctaaaaaaaaaaaaaaaaaaaa

SEQ ID NO: 106 - DNA, 1658 bp, Human
ggcacgagctcggctcctggaaagatggaggcagcggagacagaggcggaagctgcagccctagaggtcctggctgaggtggcaggcatcttggaacctgtaggcctgcaggaggaggcagaactgccagccaagatcctggttgagtttgtggtggactctcagaagaaagacaagctgctctgcagccagcttcaggtagcggatttcctgcagaacatcctggctcaggaggacactgctaagggtctcgaccccttggcttctgaagacacgagccgacagaaggcaattgcagctaaggaacaatggaaagagctgaaggccacctacagggagcacgtagaggccatcaaaattggcctcaccaaggccctgactcagatggaggaagcccagaggaaacggacacaactccgggaagcctttgagcagctccaggccaagaaacaaatggccatggagaaacgcagagcagtccagaaccagtggcagctacaacaggagaagcatctgcagcatctggcggaggtttctgcagaggtgagggagcgtaagacagggactcagcaggagcttgacagggtgtttcagaaacttggaaacctgaagcagcaggcagaacaggagcgggacaagctgcagaggtatcagaccttcctccagcttctgtataccctgcagggtaagctgttgttccctgaggctgaggctgaggcagagaatcttccagatgataaaccccagcagccgactcgaccccaggagcagagtacaggagacaccatggggagagaccctggtgtgtccttcaaggctgttggtctacaacctgctggagatgtaaatttgccatgacttcctggaggacagcagcatggagaaagatcctagaaaaggcctctgacttccctcacctcccaaccatcattacaggaaagactgtgaactcctgagttcagcttgatttctgactacatcccagcaagctctggcatctgtggattaaaatccctggatctctctcagttgtgtatttgttcatcttcatatgctggcaggaacaactattaatacagatactcagaagccaataacatgacaggagctgggactggtttgaacacagggtgtgcagatggggagggggtactggccttgggcctcctatgatgcagacatggtgaatttaattcaaggaggaggagaatgttttaggcaggtggttatatgtgggaagataattttattcatggatccaaatgtttgttgagtcctttctttgtgctaaggttcttgcggtgaaccagaattataacagtgagctcatctgactgttttaggatgtacagcctagtgttaacattcttggtatctttttgtgccttatctaaaacatttctcgatcactggtttcagatgttcatttattatattcttttcaaagattcagagattggcttttgtcatccactattgtatgttttgtttcattgacctctagtgataccttgatctttcccactttctgttttcggattggagaagatgtaccttttttgtcaactcttacttttatcagatgatcaactcacgtatttggatctttatttgttttctcaaataaatatttaaggttaaaaaaaaaaaaaaaaaaa

SEQ ID NO: 107 - protein, 277 aa, Human
MEAAETEAEAAALEVLAEVAGILEPVGLQEEAELPAKILVEFVVDSQKKDKLLCSQLQVADFLQNILAQEDTAKGLDPLASEDTSRQKAIAAKEQWKELKATYREHVEAIKIGLTKALTQMEEAQRKRTQLREAFEQLQAKKQMAMEKRRAVQNQWQLQQEKHLQHLAEVSAEVRERKTGTQQELDRVFQKLGNLKQQAEQERDKLQRYQTFLQLLYTLQGKLLFPEAEAEAENLPDDKPQQPTRPQEQSTGDTMGRDPGVSFKAVGLQPAGDVNLP

SEQ ID NO: 108 - DNA, 3413 bp, Human
cctcccctcgcccggcgcggtcccgtccgcctctcgctcgcctcccgcctcccctcggtcttccgaggcgcccgggctcccggcgcggcggcggagggggcgggcaggccggcgggcggtgatgtggcgggactctttatgcgctgcggcaggatacgcgctcggcgctgggacgcgactgcgctcagttctctcctctcggaagctgcagccatgatggaagtttgagagttgagccgctgtgaggcgaggccgggctcaggcgagggagatgagagacggcggcggccgcggcccggagcccctctcagcgcctgtgagcagccgcgggggcagcgccctcggggagccggccggcctgcggcggcggcagcggcggcgtttctcgcctcctcttcgtcttttctaaccgtgcagcctcttcctcggcttctcctgaaagggaaggtggaagccgtgggctcgggcgggagccggctgaggcgcggcggcggcggcggcacctcccgctcctggagcgggggggagaagcggcggcggcggcggccgcggcggctgcagctccagggagggggtctgagtcgcctgtcaccatttccagggctgggaacgccggagagttggtctctccccttctactgcctccaacacggcggcggcggcggcggcacatccagggacccgggccggttttaaacctcccgtccgccgccgccgcaccccccgtggcccgggctccggaggccgccggcggaggcagccgttcggaggattattcgtcttctccccattccgctgccgccgctgccaggcctctggctgctgaggagaagcaggcccagtcgctgcaaccatccagcagccgccgcagcagccattacccggctgcggtccagagccaagcggcggcagagcgaggggcatcagctaccgccaagtccagagccatttccatcctgcagaagaagccccgccaccagcagcttctgccatctctctcctcctttttcttcagccacaggctcccagacatgacagccatcatcaaagagatcgttagcagaaacaaaaggagatatcaagaggatggattcgacttagacttgacctatatttatccaaacattattgctatgggatttcctgcagaaagacttgaaggcgtatacaggaacaatattgatgatgtagtaaggtttttggattcaaagcataaaaaccattacaagatatacaatctttgtgctgaaagacattatgacaccgccaaatttaattgcagagttgcacaatatccttttgaagaccataacccaccacagctagaacttatcaaacccttttgtgaagatcttgaccaatggctaagtgaagatgacaatcatgttgcagcaattcactgtaaagctggaaagggacgaactggtgtaatgatatgtgcatatttattacatcggggcaaatttttaaaggcacaagaggccctagatttctatggggaagtaaggaccagagacaaaaagggagtaactattcccagtcagaggcgctatgtgtattattatagctacctgttaaagaatcatctggattatagaccagtggcactgttgtttcacaagatgatgtttgaaactattccaatgttcagtggcggaacttatcctcagtttgtggtctgccagctaaaggtgaagatatattcctccaattcaggacccacacgacgggaagacaagttcatgtactttgagttccctcagccgttacctgtgtgtggtgatatcaaagtagagttcttccacaaacagaacaagatgctaaaaaaggacaaaatgtttcacttttgggtaaatacattcttcataccaggaccagaggaaacctcagaaaaagtagaaaatggaagtctatgtgatcaagaaatcgatagcatttgcagtatagagcgtgcagataatgacaaggaatatctagtacttactttaacaaaaaatgatcttgacaaagcaaataaagacaaagccaaccgatacttttctccaaattttaaggtgaagctgtacttcacaaaaacagtagaggagccgtcaaatccagaggctagcagttcaacttctgtaacaccagatgttagtgacaatgaacctgatcattatagatattctgacaccactgactctgatccagagaatgaaccttttgatgaagatcagcatacacaaattacaaaagtctgaatttttttttatcaagagggataaaacaccatgaaaataaacttgaataaactgaaaatggacctttttttttttaatggcaataggacattgtgtcagattaccagttataggaacaattctcttttcctgaccaatcttgttttaccctatacatccacagggttttgacacttgttgtccagttgaaaaaaggttgtgtagctgtgtcatgtatatacctttttgtgtcaaaaggacatttaaaattcaattaggattaataaagatggcactttcccgttttattccagttttataaaaagtggagacagactgatgtgtatacgtaggaattttttccttttgtgttctgtcaccaactgaagtggctaaagagctttgtgatatactggttcacatcctacccctttgcacttgtggcaacagataagtttgcagttggctaagagaggtttccgaagggttttgctacattctaatgcatgtattcgggttaggggaatggagggaatgctcagaaaggaaataattttatgctggactctggaccatataccatctccagctatttacacacacctttctttagcatgctacagttattaatctggacattcgaggaattggccgctgtcactgcttgttgtttgcgcatttttttttaaagcatattggtgctagaaaaggcagctaaaggaagtgaatctgtattggggtacaggaatgaaccttctgcaacatcttaagatccacaaatgaagggatataaaaataatgtcataggtaagaaacacagcaacaatgacttaaccatataaatgtggaggctatcaacaaagaatgggcttgaaacattataaaaattgacaatgatttattaaatatgttttctcaattgtaacgacttctccatctcctgtgtaatcaaggccagtgctaaaattcagatgctgttagtacctacatcagtcaacaacttacacttattttactagttttcaatcataatacctgctgtggatgcttcatgtgctgcctgcaagcttcttttttctcattaaatataaaatattttgtaatgctgcacagaaattttcaatttgagattctacagtaagcgttttttttctttgaagatttatgatgcacttattcaatagctgtcagccg

SEQ ID NO: 109 - DNA, 1493 bp, Human
ccggcggctgcggcggctggagcaggcgagcggcggcggccgatagcgagtgtcagggccggccggggcggcgcttctcggcctgtcgctggtcggcctcctactgtacctcgtgcctgctgcggctgcgctggcctggctggccgtggggactaccgcggcctggtggggactgagccgcgagccccgaggttcgcgccccttgtcctccttcgttcagaaggcgcgacatcggcgaacactgttcgcttcgcctccggccaagtcgacagccaacggaaacctcctagagccgcggaccctgctcgaaggacctgaccctgccgaactgctcctcatgggcagttacctgggcaagcccgggccgccgcagcccgcccccgctccggagggccaggacctgcggaataggcctggccgccgcccgcccgcccggcgccgcgctccacaccgccctccccgccgacccatcgcgttcaccacttttacccctctctccccactcctcttctccgaccctccgggaggccttccccacgggatcgtgggactttaccagatcggtttgtaataacacctcaaagacgctatccgatccatcaggcccagtattcctgtccgggggtacttcccacagtgtgctggaatggttatcacaagaaggctgtgctgtcccctcgcaactccaggatggtgtgtagcccagtgactctgaggatcgcccctcctgacagaagattttcgcgttctgcgataccagagcagataatcagctcaacactgtcctcaccatcaagtaatgccccagacccatgtgcaaaggagactgtactgagtgccctcaaagagaagaagaagaaaaggacagtggaggaagaagaccaaatattccttgatggccaggaaaataaaagaagctgtcttgtcgacggtctcactgatgcctcttctgcattcaaagttcctcgacccgggccagatacactccagttcacagtggatgtcttccactttgctaatgactccagaaacatgatatacatcacctgccacctgaaggtcaccctagctgagcaggacccagatgaactcaacaaggcctgttccttcagcaagccttccaacagctggttcccagtggaaggcccggctgacatctgtcaatgctgtaacaaaggtgactgtggcactccaagccattccaggaggcagcctcgtgtcgtgagccagtggtccacgtctgcttcccgtaaccgcaggcatgtgacagaagaagcagatgtcaccgtgggggccactgatcttcctggacaggagtggtgaccatgaagtagagcagtgggctttgccttctgacacctcagtggtgctgctgggcgtaggcctggctgtggtggtgtccctgactctgactgctgttatcctggttctcaccaggaggtgtcgcactgcctcccaccctgtgtctgcttccgaataaaagaagaaagcaa

SEQ ID NO: 110 - protein, 210 aa, Human
MVCSPVTLRIAPPDRRFSRSAIPEQIISSTLSSPSSNAPDPCAKETVLSALKEKKKKRTVEEEDQIFLDGQENKRSCLVDGLTDASSAFKVPRPGPDTLQFTVDVFHFANDSRNMIYITCHLKVTLAEQDPDELNKACSFSKPSNSWFPVEGPADICQCCNKGDCGTPSHSRRQPRVVSQWSTSASRNRRHVTEEADVTVGATDLPGQEW

SEQ ID NO: 111 - DNA, 2700 bp, Human
gcggcgcctagtcccgggctggcgggagtgcagttctgagtcccgcccggcgtgcgcggagcggggcagccagcagcggaggcgcggcgcgcagcacacccggggaccatgggctccatgttccggagcgaggaggtggccctggtccagctctttctgcccacagcggctgcctacacctgcgtgagtcggctgggcgagctgggcctcgtggagttcagagacctcaacgcctcggtgagcgccttccagagacgctttgtggttgatgttcggcgctgtgaggagctggagaagaccttcaccttcctgcaggaggaggtgcggcgggctgggctggtcctgcccccgccaaaggggaggctgccggcacccccaccccgggacctgctgcgcatccaggaggagacggagcgcctggcccaggagctgcgggatgtgcggggcaaccagcaggccctgcgggcccagctgcaccagctgcagctccacgccgccgtgctacgccagggccatgaacctcagctggcagccgcccacacagatggggcctcagagaggacgcccctgctccaggcccccggggggccgcaccaggacctgagggtcaactttgtggcaggtgccgtggagccccacaaggcccctgccctagagcgcctgctctggagggcctgccgcggcttcctcattgccagcttcagggagctggagcagccgctggagcaccccgtgacgggcgagccagccacgtggatgaccttcctcatctcctactggggtgagcagatcggacagaagatccgcaagatcacggactgcttccactgccacgtcttcccgtttctgcagcaggaggaggcccgcctcggggccctgcagcagctgcaacagcagagccaggagctgcaggaggtcctcggggagacagagcggttcctgagccaggtgctaggccgggtgctgcagctgctgccgccagggcaggtgcaggtccacaagatgaaggccgtgtacctggccctgaaccagtgcagcgtgagcaccacgcacaagtgcctcattgccgaggcctggtgctctgtgcgagacctgcccgccctgcaggaggccctgcgggacagctcgatggaggagggagtgagtgccgtggctcaccgcatcccctgccgggacatgccccccacactcatccgcaccaaccgcttcacggccagcttccagggcatcgtggatgcctacggcgtgggccgctaccaggaggtcaaccccgctccctacaccatcatcaccttccccttcctgtttgctgtgatgttcggggatgtgggccacgggctgctcatgttcctcttcgccctggccatggtccttgcggagaaccgaccggctgtgaaggccgcgcagaacgagatctggcagactttcttcaggggccgctacctgctcctgcttatgggcctgttctccatctacaccggcttcatctacaacgagtgcttcagtcgcgccaccagcatcttcccctcgggctggagtgtggccgccatggccaaccagtctggctggagtgatgcattcctggcccagcacacgatgcttaccctggatcccaacgtcaccggtgtcttcctgggaccctacccctttggcatcgatcctatttggagcctggctgccaaccacttgagcttcctcaactccttcaagatgaagatgtccgtcatcctgggcgtcgtgcacatggcctttggggtggtcctcggagtcttcaaccacgtgcactttggccagaggcaccggctgctgctggagacgctgccggagctcaccttcctgctgggactcttcggttacctcgtgttcctagtcatctacaagtggctgtgtgtctgggctgccagggccgcctcggcccccagcatcctcatccacttcatcaacatgttcctcttctcccacagccccagcaacaggctgctctacccccggcaggaggtggtccaggccacgctggtggtcctggccttggccatggtgcccatcctgctgcttggcacacccctgcacctgctgcaccgccaccgccgccgcctgcggaggaggcccgctgaccgacaggaggaaaacaaggccgggttgctggacctgcctgacgcatctgtgaatggctggagctccgatgaggaaaaggcagggggcctggatgatgaagaggaggccgagctcgtcccctccgaggtgctcatgcaccaggccatccacaccatcgagttctgcctgggctgcgtctccaacaccgcctcctacctgcgcctgtgggccctgagcctggcccacgcccagctgtccgaggttctgtgggccatggtgatgcgcataggcctgggcctgggccgggaggtgggcgtggcggctgtggtgctggtccccatctttgccgcctttgccgtgatgaccgtggctatcctgctggtgatggagggactctcagccttcctgcacgccctgcggctgcactgggtggaattccagaacaagttctactcaggcacgggctacaagctgagtcccttcaccttcgctgccacagatgactagggcccactgcaggtcctgccagacctccttcctgacctctgaggcaggagaggaataaagacggtccgccctggcagtgaaaaaaaaaaaaaaaaaaaa

SEQ ID NO: 112 - protein, 830 aa, Human
MGSMFRSEEVALVQLFLPTAAAYTCVSRLGELGLVEFRDLNASVSAFQRRFVVDVRRCEELEKTFTFLQEEVRRAGLVLPPPKGRLPAPPPRDLLRIQEETERLAQELRDVRGNQQALRAQLHQLQLHAAVLRQGHEPQLAAAHTDGASERTPLLQAPGGPHQDLRVNFVAGAVEPHKAPALERLLWRACRGFLIASFRELEQPLEHPVTGEPATWMTFLISYWGEQIGQKIRKITDCFHCHVFPFLQQEEARLGALQQLQQQSQELQEVLGETERFLSQVLGRVLQLLPPGQVQVHKMKAVYLALNQCSVSTTHKCLIAEAWCSVRDLPALQEALRDSSMEEGVSAVAHRIPCRDMPPTLIRTNRFTASFQGIVDAYGVGRYQEVNPAPYTIITFPFLFAVMFGDVGHGLLMFLFALAMVLAENRPAVKAAQNEIWQTFFRGRYLLLLMGLFSIYTGFIYNECFSRATSIFPSGWSVAAMANQSGWSDAFLAQHTMLTLDPNVTGVFLGPYPFGIDPIWSLAANHLSFLNSFKMKMSVILGVVHMAFGVVLGVFNHVHFGQRHRLLLETLPELTFLLGLFGYLVFLVIYKWLCVWAARAASAPSILIHFINMFLFSHSPSNRLLYPRQEVVQATLVVLALAMVPILLLGTPLHLLHRHRRRLRRRPADRQEENKAGLLDLPDASVNGWSSDEEKAGGLDDEEEAELVPSEVLMHQAIHTIEFCLGCVSNTASYLRLWALSLAHAQLSEVLWAMVMRIGLGLGREVGVAAVVLVPIFAAFAVMTVAILLVMEGLSAFLHALRLHWVEFQNKFYSGTGYKLSPFTFAATDD

SEQ ID NO: 113 - DNA, 1125 bp, Human
gtctcccccactgtcagcacctcttctgtgtggtgagtggaccgcttaccccactaggtgaagatgtcagcccaggagagctgcctcagcctcatcaagtacttcctcttcgttttcaacctcttcttcttcgtcctcggcagcctgatcttctgcttcggcatctggatcctcatcgacaagaccagcttcgtgtcctttgtgggcttggccttcgtgcctctgcagatctggtccaaagtcctggccatctcaggaatcttcaccatgggcatcgccctcctgggttgtgtgggggccctcaaggagctccgctgcctcctgggcctgtattttgggatgctgctgctcctgtttgccacacagatcaccctgggaatcctcatctccactcagcgggcccagctggagcgaagcttgcgggacgtcgtagagaaaaccatccaaaagtacggcaccaaccccgaggagaccgcggccgaggagagctgggactatgtgcagttccagctgcgctgctgcggctggcactacccgcaggactggttccaagtcctcatcctgagaggtaacgggtcggaggcgcaccgcgtgccctgctcctgctacaacttgtcggcgaccaacgactccacaatcctagataaggtgatcttgccccagctcagcaggcttggacacctggcgcggtccagacacagtgcagacatctgcgctgtccctgcagagagccacatctaccgcgagggctgcgcgcagggcctccagaagtggctgcacaacaaccttatttccatagtgggcatttgcctgggcgtcggcctactcgagctcgggttcatgacgctctcgatattcctgtgcagaaacctggaccacgtctacaaccggctcgctcgataccgttaggccccgccctccccaaagtcccgccccgcccccgtcacgtgcgctgggcacttccctgctgcctgtaaatatttgtttaatccccagttcgcctggagccctccgccttcacattcccctggggacccacgtggctgcgtgcccctgctgctgtcacctctcccacgggacctggggctttcgtccacagcttcctgtccccatctgtcggcctac

SEQ ID NO: 114 - protein, 281 aa, Human
MSAQESCLSLIKYFLFVFNLFFFVLGSLIFCFGIWILIDKTSFVSFVGLAFVPLQIWSKVLAISGIFTMGIALLGCVGALKELRCLLGLYFGMLLLLFATQITLGILISTQRAQLERSLRDVVEKTIQKYGTNPEETAAEESWDYVQFQLRCCGWHYPQDWFQVLILRGNGSEAHRVPCSCYNLSATNDSTILDKVILPQLSRLGHLARSRHSADICAVPAESHIYREGCAQGLQKWLHNNLISIVGICLGVGLLELGFMTLSIFLCRNLDHVYNRLARYR

SEQ ID NO: 115 - DNA, 2101 bp, Human
cgcgcgcggcgaatctcaacgctgcgccgtctgcgggcgcttccgggccaccagtttctctgctttccaccctggcgccccccagccctggctccccagctgcgctgccccgggcgtccacgccctgcgggcttagcgggttcagtgggctcaatctgcgcagcgccacctccatgttgaccaagcctctacaggggcctcccgcgccccccgggacccccacgccgccgccaggaggcaaggatcgggaagcgttcgaggccgagtatcgactcggccccctcctgggtaaggggggctttggcaccgtcttcgcaggacaccgcctcacagatcgactccaggtggccatcaaagtgattccccggaatcgtgtgctgggctggtcccccttgtcagactcagtcacatgcccactcgaagtcgcactgctatggaaagtgggtgcaggtggtgggcaccctggcgtgatccgcctgcttgactggtttgagacacaggagggcttcatgctggtcctcgagcggcctttgcccgcccaggatctctttgactatatcacagagaagggcccactgggtgaaggcccaagccgctgcttctttggccaagtagtggcagccatccagcactgccattcccgtggagttgtccatcgtgacatcaaggatgagaacatcctgatagacctacgccgtggctgtgccaaactcattgattttggttctggtgccctgcttcatgatgaaccctacactgactttgatgggacaagggtgtacagccccccagagtggatctctcgacaccagtaccatgcactcccggccactgtctggtcactgggcatcctcctctatgacatggtgtgtggggacattccctttgagagggaccaggagattctggaagctgagctccacttcccagcccatgtctccccagactgctgtgccctaatccgccggtgcctggcccccaaaccttcttcccgaccctcactggaagagatcctgctggacccctggatgcaaacaccagccgaggatgtacccctcaacccctccaaaggaggccctgcccctttggcctggtccttgctaccctaagcctggcctggcctggcctggcccccaatggtcagaagagccatcccatggccatgtcacagggatagatggacatttgttgacttggttttacaggtcattaccagtcattaaagtccagtattactaaggtaagggattgaggatcaggggttagaagacataaaccaagtctgcccagttcccttcccaatcctacaaaggagccttcctcccagaacctgtggtccctgattctggagggggaacttcttgcttctcattttgctaaggaagtttattttggtgaagttgttcccattctgagccccgggactcttattctgatgatgtgtcaccccacattggcacctcctactaccaccacacaaacttagttcatatgctcttacttgggcaagggtgctttccttccaataccccagtagcttttattttagtaaagggaccctttcccctagcctagggtcccatattgggtcaagctgcttacctgcctcagcccaggattctttattctgggggaggtaatgccctgttgttaccccaaggcttcttttttttttttttttgggtgaggggaccctactctgttatcccaagtgctcttattctggtgagaagaaccttacttccataatttgggaaggaatggaagatggacaccaccggacaccaccagacactaggatgggatggatggttttttgggggatgggctaggggaaataaggcttgctgtttgttctcctggggcgctccctccaacttttgcagattcttgcaacctcctcctgagccgggattgtccaattactaaaatgtaaataatcacgtattgtggggaggggagttccaagtgtgccctcctctcttctcctgcctggattatttaaaaagccatgtgtggaaacccactatttaataaaagtaatagaatcagaaaaaaaaaaaaaaaaaaaaaaaaaaaaaaaaaaaaaaaaaaaaaaaaa

SEQ ID NO: 116 - DNA, 1587 bp, Human
tggcactaggggcagccactcagcccttcgagctgtaggggaggcgctgcgcccccggccccagccgatcgggggctcctggcgctactgccctccagagtccctcctgccgtctgacttgagtccctgctgctgcagtgcacgcccccctttcggcagccagggtggggcccagacccaacctggcccctcctgcccccaccccgcctttgggtcgctgacccccaggctgtggtgagggtctgagagctggtaccacggagcctgggcaacctcctccgcccacccatgcccaccccgcatgaggctgagaagcagatcacagggccagaggaggcggaccggcccccttcaatgtccagtcatgatacagcctctccagcggcccccagccgcaacccctgctgcctgtgctggtgctgctgctgtagctgctcctggaaccaagagcggcggcgcgcgtggcaggcctcccgggagagcaagctgcagcccctccccagctgtgaagtatgtgccacgccaagtcctgaggaggtgcagagctgggcgcagtcttttgacaagctgatgcacagcccagcgggacgcagcgtgttccgggcgttcctgcggacagagtacagcgaggagaacatgctcttctggttggcctgcgaggagctgaaggccgaggccaaccagcatgtggtagacgagaaggcgaggctcatctacgaggactacgtatccatcctgtcccccaaggaggtgagcctggactcccgtgtgcgggagggcatcaacaagaagatgcaggagccgtccgcacacacgttcgacgacgcgcagctgcagatctacacgctcatgcaccgggactcctacccccgcttcctcagctctcccacctaccgtgccctgctgctgcaggggccatcacagtcctcctccgaggcctaggccgcccccagcagcacagaccccgccgcctcctacggccgactctgggttcccttcaggtgttggtgtcggcagggctgtcagggcacatgcctggccggctggggtccccacccgcggagacggtcctagacccagtggggagtgctgtgtctcctgggtctgcccacccgtggccaagcaggaactccaggtgcagggcgggcctccaggtgcagggcgggccagaagccccctcatcggcccgcagctggctggcccagtgctcctggctgggggctcttgcgtggtgagagtaggggtccccccaggagccatgctggacccatgagcctcgctggggcctcctccccaggcagccaatgggccccagacaagcctttggtggggaacagaacctccgcatcgtgtagttttgtgacataaggagacctcctacttgagctgtctgtaccccagaatcaaacacagaactcagaaccagatttaggccctcagaatcctgcactcaaggtggcaggacccaatttctgttttatatgttcatgaactttaaacctggaaacatgtccttactaggtgttttatcaaaaaaaagttttttattattgaagatatttttaaagcaaaaaaaaaaaaaaaaaa

SEQ ID NO: 117 - protein, 217 aa, Human
MPTPHEAEKQITGPEEADRPPSMSSHDTASPAAPSRNPCCLCWCCCCSCSWNQERRRAWQASRESKLQPLPSCEVCATPSPEEVQSWAQSFDKLMHSPAGRSVFRAFLRTEYSEENMLFWLACEELKAEANQHVVDEKARLIYEDYVSILSPKEVSLDSRVREGINKKMQEPSAHTFDDAQLQIYTLMHRDSYPRFLSSPTYRALLLQGPSQSSSEA

SEQ ID NO: 118 - DNA, 3984 bp, Human
ggaaaaccgaggaatacacatgcgcagttggacccctcaggcccttcgtgtcccttcccacccatctccccgccccggccctctgggcggggctgggccgacagtccagctgcagctcgctggagattcagtgacttccttgttgtgagccccggcccggcagtgtcccgactcgtagccccgctgttcttaatccgggccgctagcctgagtctaggtcgcagccgcagccccaccccgtcggtcaccttttcagcgcaggtcctttccccgcacgccctgcgctccctaacatgcccaaccccagcagcacctcctctccctaccccctccctgaggaaattaggaacctgttggcagatgttgaaacatttgtagcagatatactgaaaggagaaaatttatccaagaaagcaaaggaaaagagagaatcccttattaagaagataaaagatgtaaagtctatctatcttcaggaatttcaagacaaaggtgatgcagaagatggggaagaatatgatgacccttttgctgggcctccagacactatttcattagcctcagaacgatatgataaagacgatgaagccccctctgatggagcccagtttcctccaattgcagcacaagaccttccttttgttctaaaggctggctaccttgaaaaacgcagaaaagatcacagctttctgggatttgaatggcagaaacggtggtgtgctctcagtaaaacggtattctattattatggaagtgataaagacaaacaacagaaaggtgaatttgcaatagatggctacagtgtcagaatgaataacactctaagaaaggatggaaagaaagattgctgttttgaaatctctgctcctgataaacgtatatatcagtttacagcagcttctcccaaagatgctgaagaatgggtacagcagctgaaatttgtattgcaagatatggaatctgatattattcctgaggattatgatgagagaggagaattatatgatgatgttgatcatcctctaccaataagcaatccactaacaagcagtcaaccaatagatgatgaaatttatgaagaacttccagaagaagaagaggacagtgctccagtgaaagtggaagaacaaaggaagatgagtcaggatagtgtccatcacacctcaggggataagagcactgattatgctaatttttaccagggattgtgggattgtactggagctttttctgatgagttgtcatttaagcgtggtgatgtgatttacattcttagcaaggaatacaatagatatggctggtgggtaggagaaatgaagggagccattggcttggtgcctaaagcctacataatggagatgtatgatatttgagagtcctggaaaaggaaaattcttctgcttgtctgcaaatgctttggatttagaagcgtcatgaaagcacgagtgacagctcctaacctctccttgttttattaaacattacttatctttgactgttattttatgcagtcgctcattaaaatattcctctgatgtgaaattaaatgaaggatattaatgtaaattagatgcaaccagttaagttatacctgttgctattttgcaaagaaataattatagtttttatttacccatttgatttgtgtgaagaattcatcactattttatacgtaacatatagtctactatagcatagtatgctactattgctacttctggtgtgatttgtaatgtttcttaatcattggacatcaattatttttagagagtaatgtataatttcatagcattttaaatttagtgtatcatgcgagttttttttggtagatgctgaagaatgtggttgctaaacaaagaatgctaaagaatgttcaaactttatagataactttattgttattatttattttcacacatttaattcctattaagtacagccgcaagaaagaaaaaatgatgaagttgcaaatggcagtgtgctgtcacctgcaacagaagtgcgtaccagaagtatgactcatgcaaagcattttaccgtacaaatatcctggtgcgatgatgggcctggcaacattttctactgtacttttgtttaaatttaatgaaacaaaaaattcctaagaaataccaccctaccactaacaaaatggtataaagaatctcccagccaggccaacatggtgaaaccctgtctctactaaaaattagccaagtgtggtaatgttcacctgcagtcccagctacttgggaggccaaggcacgagaattgcttgaacaaggtaggcagaggttgcagtgagccaagatcgcgccactgcactccagcctgggcgacagagtgagactccatctcagaaaaaaaaaaaaaaaaaaacagaatctcagtgtattctcaaagtaaaaaggcataaccaagcactctcttatcttgccttattgctatactatttacatcccactgcagaacagcagatttgaggcttttctatatacttctcagagcactgaaaagaaaggaagggtttgcagaggagagtgtagaaatcccagtggtagcatgtaccaacaggtgagtagaaaggtagtgttagcctgacatttgagttatactctgtgctgcctgagcaagatttgtagaatcatataattaccttttcatgtatatttgaaatcagaggtgtttaaaatacctatgagataccaatgtagccttaacatatgtcaaaatgcattgctggttagataattatttggactacacataaactcctaatattgaatcattacctatcaggtattatctttatggaacttttcaatatctttgctttataaagattctaaacatgtatctgagctggtaatattttaaaatctccattatttgtgtaaaactgtttataagcagtgtttgagagggtctgctttaccattaccccctcaatatcatgatcatccaatctcaaatgtgaaaaaaaaaaagaaatttgattttaggtattgtgagtaaacaagtttatatagagagacattgtgaagttaaagttttcagaagttacatttgtgcagttcttaccttttcctcatatagtgccattgaaatagactgaaattatcttggcaaaagttagacaaccaaagacgactttagtggactggttttcaaaacttgagcagctgaaaagcaaaagccgttgtttcccatgacaatgtagcctttgtggatttgggtttgtgctttgggttgaaaagaagtttttagtcctaggccagtagatggcagcagcttttcattgcagacaaaacctcttgaaacccttcccccatggcacaaactcgcccatgatggaaagcatctagatttctgcctccttttacagttaatccaggagagggagtcctttgccaactgatgaccaacagttccaagccagatagtctcgtgaacagtgacaatacagaaataaggtgttatttctgttcagatctccaccggcctttgttcttttaaaacttgaatataggtgggagacataagaaaggaaagaaaagacttaaaactggagtgacaggacaaataatcattactttcaattcatgactgctttatattcatttgatgaaatcatttgtatacaaaccagggagagttttctttacacccttgacaatatatcacatactcttcaagatcataataatatcattaatataaatttaaacaacatggcttgttagaaaatatgctaattgctatggtctcattatgtttgcttagcttttatttgtttttctgtgaacagttagagagctaatttttttcaaaggtgattgtaagtcatattttatatagcattttgcttgattatttgctctgtactgaatttgtactctattgccattagatcttacaataatgttccactctgcaaatttttaaggttcaaataaagtttaattgtttgcaaaaaaaaaaaaaaaa

SEQ ID NO: 119 - DNA, 1973 bp, Human
gggatattggagtagcaagaggctgggaagccatcacttaccttgcactgagaaagaagacaaaggccagtatgcacagctttcctccactgctgctgctgctgttctggggtgtggtgtctcacagcttcccagcgactctagaaacacaagagcaagatgtggacttagtccagaaatacctggaaaaatactacaacctgaagaatgatgggaggcaagttgaaaagcggagaaatagtggcccagtggttgaaaaattgaagcaaatgcaggaattctttgggctgaaagtgactgggaaaccagatgctgaaaccctgaaggtgatgaagcagcccagatgtggagtgcctgatgtggctcagtttgtcctcactgaggggaaccctcgctgggagcaaacacatctgacctacaggattgaaaattacacgccagatttgccaagagcagatgtggaccatgccattgagaaagccttccaactctggagtaatgtcacacctctgacattcaccaaggtctctgagggtcaagcagacatcatgatatcttttgtcaggggagatcatcgggacaactctccttttgatggacctggaggaaatcttgctcatgcttttcaaccaggcccaggtattggaggggatgctcattttgatgaagatgaaaggtggaccaacaatttcagagagtacaacttacatcgtgttgcggctcatgaactcggccattctcttggactctcccattctactgatatcggggctttgatgtaccctagctacaccttcagtggtgatgttcagctagctcaggatgacattgatggcatccaagccatatatggacgttcccaaaatcctgtccagcccatcggcccacaaaccccaaaagcgtgtgacagtaagctaacctttgatgctataactacgattcggggagaagtgatgttctttaaagacagattctacatgcgcacaaatcccttctacccggaagttgagctcaatttcatttctgttttctggccacaactgccaaatgggcttgaagctgcttacgaatttgccgacagagatgaagtccggtttttcaaagggaataagtactgggctgttcagggacagaatgtgctacacggataccccaaggacatctacagctcctttggcttccctagaactgtgaagcatatcgatgctgctctttctgaggaaaacactggaaaaacctacttctttgttgctaacaaatactggaggtatgatgaatataaacgatctatggatccaggttatcccaaaatgatagcacatgactttcctggaattggccacaaagttgatgcagttttcatgaaagatggatttttctatttctttcatggaacaagacaatacaaatttgatcctaaaacgaagagaattttgactctccagaaagctaatagctggttcaactgcaggaaaaattgaacattactaatttgaatggaaaacacatggtgtgagtccaaagaaggtgttttcctgaagaactgtctattttctcagtcatttttaacctctagagtcactgatacacagaatataatcttatttatacctcagtttgcatatttttttactatttagaatgtagccctttttgtactgatataatttagttccacaaatggtgggtacaaaaagtcaagtttgtggcttatggattcatataggccagagttgcaaagatcttttccagagtatgcaactctgacgttgatcccagagagcagcttcagtgacaaacatatcctttcaagacagaaagagacaggagacatgagtctttgccggaggaaaagcagctcaagaacacatgtgcagtcactggtgtcaccctggataggcaagggataactcttctaacacaaaataagtgttttatgtttggaataaagtcaaccttgtttctactgtttt

SEQ ID NO: 120 - protein, 469 aa, Human
MHSFPPLLLLLFWGVVSHSFPATLETQEQDVDLVQKYLEKYYNLKNDGRQVEKRRNSGPVVEKLKQMQEFFGLKVTGKPDAETLKVMKQPRCGVPDVAQFVLTEGNPRWEQTHLTYRIENYTPDLPRADVDHAIEKAFQLWSNVTPLTFTKVSEGQADIMISFVRGDHRDNSPFDGPGGNLAHAFQPGPGIGGDAHFDEDERWTNNFREYNLHRVAAHELGHSLGLSHSTDIGALMYPSYTFSGDVQLAQDDIDGIQAIYGRSQNPVQPIGPQTPKACDSKLTFDAITTIRGEVMFFKDRFYMRTNPFYPEVELNFISVFWPQLPNGLEAAYEFADRDEVRFFKGNKYWAVQGQNVLHGYPKDIYSSFGFPRTVKHIDAALSEENTGKTYFFVANKYWRYDEYKRSMDPGYPKMIAHDFPGIGHKVDAVFMKDGFFYFFHGTRQYKFDPKTKRILTLQKANSWFNCRKN

SEQ ID NO: 121 - DNA, 2599 bp, Human
ggagtaaacccctaaggggctcacttaaggaggaggtagccctggatttgagtgtgaggaagcccacagcagaggcctcccctgtcaaggcttcccattctgtggagcatgccaagcctactgcagccatggatgtgccagatgtgggcaacatggtgtcagatctgccaggcctgaaaaagatagacacagaagcaccaggcttgcctggggtgccagtgaccacagatgccatgccaaggaccaacttccacagctctgtggccttcatgttccgaaagttcaagatcctccgtccggcacctttgcctgcagccgtggtcccgtccacgcccacctcagctcctgctcccacacagcctgcacccacccccacatctgggcccattggactgcggattctcgctcaacagcccttgtctgtgacctgcttcagcctggcactgcccagccctccagccgtagctgtggcctcccctgcccctgctccagctccatcccctgctccggctcgagctcaggctccagcttcagcccgggatccagctccagctccagctccagttgcaggccctgctccagcatctacttcagccccaggggactccctggagcagcattttacaggactacatgcgtccctgtgtgatgctatttctggctccgtcgcccactctcctccagagaagcttcgcgagtggctagagacggctgggccctggggccaggctgcgtggcaggactgccagggtgtgcaggggctgctggccaagctgctgtctcagctgcagcgcttcgatcgcacccaccggtgccccttcccccatgtggtgcgagctggcgccatcttcgtgcccattcacctggtgaaggagcggctcttccctcggctgccacccgcttctgtggaccatgtgctgcaggagcatcgtgtggagctgcggcccaccacgctgtcggaggagcgggcactgcgggagctcgccctgccaggctgcacctcacgcatgctgaagttaacctggcgctgcgccagctgccggacatttaccccgaccttctcggcctgcagtggcgcgactgtgtacgccgccagctgggtgagcatggggcagccccagtggccaccggagctgtgtgagcaagtgacaggtgactttgacactgaggctggagctgtgtcctcctcagagcccactgtggccagagatgagccagagagcctagccctggctcagaagtcaccggcccccaaggtcaggaagccaggcaggaagccaccaacccctggcccggagaaagcagaggcagctgctggggaagagtcctgtggtgcctcccctacccctgctaccagtgccagcccacctggccccacactgaaggcccgcttccgcagtctgctggagaccgcctggctcaatggcctggctctgcccacctggggccacaagtcctcaagaccagaccagccctcaccctgcccacagctgctggacagccagagccatcacctgtagcactggttgccagtgctgtgtgtatagcagtcactctccacccttcccttctgcctgcccagctgccccggggccacgagtggatgctggggctgtggctgctcccctggaggggttccatctctgaccctgtggcccattcagggtgggctgaagagcccctgagcttttaacgtgagggtctttattggataggactactccctatttcttgcctagagaacacacatgggctttggagcccgacagacctgggcttgaatcccggctcgtgttcttgctgcaggacctgggcaagaaacttcacctctgctgagccctcattccccatgtgtaaaatgggacaacgcaacctacctcacagggttgttgtggggatgctgcctgatacataccctgtcaccatttggtctctgcttcctctctgggacagggcctagaattggaggcagagaaccttcctatagaaagtcttcgtgtgtcctaggacttggctatcgtagagtggtaccttaggcagtggatgtgactcacactttcaggagtcaccccccagcatttggggttgggttggccctactccagcctggagctccctgagggagcctgcactccctgctcccaatccccgctactggtgcagggatgcagcctggagctggcgtccttgttctgggcctgctgctgccgccaccccaggaggccccaggcctgtcctgaattgacatcagtgcttccctgaactgcctcccccacccctggcattatcccaggaaacttatgttttctagaagctaagcagctgctgggactcagggactggtgcaggtaggctgagtggcagctcagtcctagaaggtctctgaagatctggactgaggaccctgctactccccaagccagagcccatcagccaggcctgctgtgagccacctgcctgtggagtgctgagctcaaccaaaggctggcaagctctgggcctcatttaagggattctgatgagccgatgggccctggaggcagcccattaaagcatctggctcgtttttggaaaaaaaaaaaaaaaaaaaaaaaaaaaa

SEQ ID NO: 122 - DNA, 2324 bp, Human
ctccctttgggcaaggacctgagacccttgtgctaagtcaagaggctcaatgggctgcagaagaactagagaaggaccaagcaaagccatgatatttccatggaaatgtcagagcacccagagggacttatggaacatcttcaagttgtgggggtggacaatgctctgttgtgatttcctggcacatcatggaaccgactgctggacttaccattattctgaaaaacccatgaactggcaaagggctagaagattctgccgagacaattacacagatttagttgccatacaaaacaaggcggaaattgagtatctggagaagactctgcctttcagtcgttcttactactggataggaatccggaagataggaggaatatggacgtgggtgggaaccaacaaatctcttactgaagaagcagagaactggggagatggtgagcccaacaacaagaagaacaaggaggactgcgtggagatctatatcaagagaaacaaagatgcaggcaaatggaacgatgacgcctgccacaaactaaaggcagccctctgttacacagcttcttgccagccctggtcatgcagtggccatggagaatgtgtagaaatcatcaataattacacctgcaactgtgatgtggggtactatgggccccagtgtcagtttgtgattcagtgtgagcctttggaggccccagagctgggtaccatggactgtactcaccctttgggaaacttcagcttcagctcacagtgtgccttcagctgctctgaaggaacaaacttaactgggattgaagaaaccacctgtggaccatttggaaactggtcatctccagaaccaacctgtcaagtgattcagtgtgagcctctatcagcaccagatttggggatcatgaactgtagccatcccctggccagcttcagctttacctctgcatgtaccttcatctgctcagaaggaactgagttaattgggaagaagaaaaccatttgtgaatcatctggaatctggtcaaatcctagtccaatatgtcaaaaattggacaaaagtttctcaatgattaaggagggtgattataaccccctcttcattccagtggcagtcatggttactgcattctctgggttggcatttatcatttggctggcaaggagattaaaaaaaggcaagaaatccaagagaagtatgaatgacccatattaaatcgcccttggtgaaagaaaattcttggaatactaaaaatcatgagatcctttaaatccttccatgaaacgttttgtgtggtggcacctcctacgtcaaacatgaagtgtgtttccttcagtgcatctgggaagatttctacctgaccaacagttccttcagcttccatttcgcccctcatttatccctcaacccccagcccacaggtgtttatacagctcagctttttgtcttttctgaggagaaacaaataagaccataaagggaaaggattcatgtggaatataaagatggctgactttgctctttcttgactcttgttttcagtttcaattcagtgctgtacttgatgacagacacttctaaatgaagtgcaaatttgatacatatgtgaatatggactcagttttcttgcagatcaaatttcacgtcgtcttctgtatactgtggaggtacactcttatagaaagttcaaaaagtctacgctctcctttctttctaactccagtgaagtaatggggtcctgctcaagttgaaagagtcctatttgcactgtagcctcgccgtctgtgaattggaccatcctatttaactggcttcagcctccccaccttcttcagccacctctctttttcagttggctgacttccacacctagcatctcatgagtgccaagcaaaaggagagaagagagaaatagcctgcgctgttttttagtttgggggttttgctgtttccttttatgagacccattcctatttcttatagtcaatgtttcttttatcacgatattattagtaagaaaacatcactgaaatgctagctgcaagtgacatctctttgatgtcatatggaagagttaaaacaggtggagaaattccttgattcacaatgaaatgctctcctttcccctgcccccagaccttttatccacttacctagattctacatattctttaaatttcatctcaggcctccctcaaccccaccacttcttttataactagtcctttactaatccaacccatgatgagctcctcttcctggcttcttactgaaaggttaccctgtaacatgcaattttgcatttgaataaagcctgctttttaagtgttaa

SEQ ID NO: 123 - protein, 372 aa, Human [sequence omitted]

SEQ ID NO: 124 - DNA, 3260 bp, Human
ctggagagtaaaaagaactgggggtaagagcccctctgcctagcactgctcccccaaggctcccagaaatctcaggtcagaggcacggacagcctctggagctctcgtctggtgggaccatgaactgccagcagctgtggctgggcttcctactccccatgacagtctcaggccgggtcctggggcttgcagaggtggcgcccgtggactacctgtcacaatatgggtacctacagaagcctctagaaggatctaataacttcaagccagaagatatcaccgaggctctgagagcttttcaggaagcatctgaacttccagtctcaggtcagctggatgatgccacaagggcccgcatgaggcagcctcgttgtggcctagaggatcccttcaaccagaagacccttaaatacctgttgctgggccgctggagaaagaagcacctgactttccgcatcttgaacctgccctccacccttccaccccacacagcccgggcagccctgcgtcaagccttccaggactggagcaatgtggctcccttgaccttccaagaggtgcaggctggtgcggctgacatccgcctctccttccatggccgccaaagctcgtactgttccaatacttttgatgggcctgggagagtcctggcccatgccgacatcccagagctgggcagtgtgcacttcgacgaagacgagttctggactgaggggacctaccgtggggtgaacctgcgcatcattgcagcccatgaagtgggccatgctctggggcttgggcactcccgatattcccaggccctcatggccccagtctacgagggctaccggccccactttaagctgcacccagatgatgtggcagggatccaggctctctatggcaagaagagtccagtgataagggatgaggaagaagaagagacagagctgcccactgtgcccccagtgcccacagaacccagtcccatgccagacccttgcagtagtgaactggatgccatgatgctggggccccgtgggaagacctatgctttcaagggggactatgtgtggactgtatcagattcaggaccgggccccttgttccgagtgtctgccctttgggaggggctccccggaaacctggatgctgctgtctactcgcctcgaacacaatggattcacttctttaagggagacaaggtgtggcgctacattaatttcaagatgtctcctggcttccccaagaagctgaatagggtagaacctaacctggatgcagctctctattggcctctcaaccaaaaggtgttcctctttaagggctccgggtactggcagtgggacgagctagcccgaactgacttcagcagctaccccaaaccaatcaagggtttgtttacgggagtgccaaaccagccctcggctgctatgagttggcaagatggccgagtctacttcttcaagggcaaagtctactggcgcctcaaccagcagcttcgagtagagaaaggctatcccagaaatatttcccacaactggatgcactgtcgtccccggactatagacactaccccatcaggtgggaataccactccctcaggtacgggcataaccttggataccactctctcagccacagaaaccacgtttgaatactgactgctcacccacagacacaatcttggacattaacccctgaggctccaccacccaccctttcatttcccccccagaagcctaaggcctaatagctgaatgaaatacctgtctgctcagtagaaccttgcaggtgctgtagcaggcgcaagaccgtagatctcaggcctctaacacttccaactccagccaccactttcctgtgcattttcactcctgagaagtgctcccctaactcagatcccctaacttagatttggcccccaactccatttcctgtctgtcttagacagcccttccaactgtgtcatctcttctctggaggtcaatggtggagggagatgcctgggtcctgttcttcctacataaaatgcaagaaaacagcatggccagtaaactgagcaagggccttggaatccttgagaatcacatttatgtgcttatgattacgggcaagctaattaaccttgttgaatctcagattccccatttgcaacattaggttaagaccagtactgcaggattgttgcactaaatgaaatactgtatgtgaagtgcctggcacagtgtctggtacatttgtgtttaataaaagctaactccatgttcataagagaggactgaacagctcttcctctagctgtctggctgtataactcttacagtagtctgtataataagggcatctctattagatctttaggggacagaggatttgtcaagatggttagctctttgttttggggtgcagagaaagaaaagagcagcaacagcagaggctggactccctggttcagtatttaatgccattttattcacatgctcccatgttctccctccctcccattgtagccttgctgcccaggggagggatatgtcttcctttatgcatctgggaaaccaggaacagaccctgcgcaggagagtcagagggggaagagttagaatgggtcagtggctggaacaaagttctggttaaggaggaaattagtgccacccacggtgagaagcagagaaggcacttgcatcctatgcagccctgaagaccaggctcctttgggcaaaaggcaagactctggcaggtgggtcaatgctctctccttggagcaagaagccagcttttggggaaggcaggtcctgaggcaggcactgccctgtggtcttccccaggttgaggagagaagtggaagccccatggaagacagtgctcccagctgaggtaggaggcggaggtgggggtgggggtagtttaagcctatggggcccagggggaaaggccaaacagaaacccaactaccccctaatgaagggcctggaggttggggtatcttggagctcctcagagcccttcttcccatcaaaaaggtatcaaatgccttggaagctccctgatcctacaaaacaaaaaaatgcttatttttaccactgtgaggcaagctgaggtgaacatttaaaaggctatttcaagacgaggtgcggtggctataatcctagcactttgggaggctgaagcaggaggatcacttgagcccaggagttcaagaccagcttgggcaacatagggagaccctgtctctgcaaaaaaataaaaacgaatacataaaaattaaaaaaaaa

SEQ ID NO: 125 - DNA, 1900 bp, Human
acaactctcagaggagcattgcccgtcagacagcaactcagagaataaccagagaacaaccagattgaaacaatggaggatctttgtgtggcaaacacactctttgccctcaatttattcaagcatctggcaaaagcaagccccacccagaacctcttcctctccccatggagcatctcgtccaccatggccatggtctacatgggctccaggggcagcaccgaagaccagatggccaaggtgcttcagtttaatgaagtgggagccaatgcagttacccccatgactccagagaactttaccagctgtgggttcatgcagcagatccagaagggtagttatcctgatgcgattttgcaggcacaagctgcagataaaatccattcatccttccgctctctcagctctgcaatcaatgcatccacagggaattatttactggaaagtgtcaataagctgtttggtgagaagtctgcgagcttccgggaagaatatattcgactctgtcagaaatattactcctcagaaccccaggcagtagacttcctagaatgtgcagaagaagctagaaaaaagattaattcctgggtcaagactcaaaccaaaggcaaaatcccaaacttgttacctgaaggttctgtagatggggataccaggatggtcctggtgaatgctgtctacttcaaaggaaagtggaaaactccatttgagaagaaactaaatgggctttatcctttccgtgtaaactcggctcagcgcacacctgtacagatgatgtacttgcgtgaaaagctaaacattggatacatagaagacctaaaggctcagattctagaactcccatatgctggagatgttagcatgttcttgttgcttccagatgaaattgccgatgtgtccactggcttggagctgctggaaagtgaaataacctatgacaaactcaacaagtggaccagcaaagacaaaatggctgaagatgaagttgaggtatacataccccagttcaaattagaagagcattatgaactcagatccattctgagaagcatgggcatggaggacgccttcaacaagggacgggccaatttctcagggatgtcggagaggaatgacctgtttctttctgaagtgttccaccaagccatggtggatgtgaatgaggagggcactgaagcagccgctggcacaggaggtgttatgacagggagaactggacatggaggcccacagtttgtggcagatcatccttttctttttcttattatgcataagataaccaactgcattttatttttcggcagattttcctcaccctaaaactaagcgtgctgcttctgcaaaagatttttgtagatgagctgtgtgcctcagaattgctatttcaaattgccaaaaatttagagatgttttctacatatttctgctcttctgaacaacttctgctacccactaaataaaaacacagaaataattagacaattgtctattataacatgacaaccctattaatcatttggtcttctaaaatgggatcatgcccatttagattttccttactatcagtttatttttataacattaacttttactttgttatttattattttatataatggtgagtttttaaattattgctcactgcctatttaatgtagctaataaagttatagaagcagatgatctgttaatttcctatctaataaatgcctttaattgttctcataatgaagaataagtaggtaccctccatgcccttctgtaataaatatctggaaaaaacattaaacaataggcaaatatatgttatgtgcatttctagaaatacataacacatatatatgtctgtatcttatattcaattgcaagtatataataaataaacctgcttccaaacaac

SEQ ID NO: 126 - protein, 415 aa, Human
MEDLCVANTLFALNLFKHLAKASPTQNLFLSPWSISSTMAMVYMGSRGSTEDQMAKVLQFNEVGANAVTPMTPENFTSCGFMQQIQKGSYPDAILQAQAADKIHSSFRSLSSAINASTGNYLLESVNKLFGEKSASFREEYIRLCQKYYSSEPQAVDFLECAEEARKKINSWVKTQTKGKIPNLLPEGSVDGDTRMVLVNAVYFKGKWKTPFEKKLNGLYPFRVNSAQRTPVQMMYLREKLNIGYIEDLKAQILELPYAGDVSMFLLLPDEIADVSTGLELLESEITYDKLNKWTSKDKMAEDEVEVYIPQFKLEEHYELRSILRSMGMEDAFNKGRANFSGMSERNDLFLSEVFHQAMVDVNEEGTEAAAGTGGVMTGRTGHGGPQFVADHPFLFLIMHKITNCILFFGRFSSP

SEQ ID NO: 127 - DNA, 1413 bp, Human
agggaataaaggctcagggaccggcagttctactctagagcccaccagcctctcagagcctccggtgactggcctgtgtctccccctggatggacatgtggacggcgctgctcatcctgcaagccttgttgctaccctccctggctgatggtgccacccctgccctgcgctttgtagccgtgggtgactggggaggggtccccaatgccccattccacacggcccgggaaatggccaatgccaaggagatcgctcggactgtgcagatcctgggtgcagacttcatcctgtctctaggggacaatttttacttcactggtgtgcaagacatcaatgacaagaggttccaggagacctttgaggacgtattctctgaccgctcccttcgcaaagtgccctggtacgtgctagccggaaaccatgaccaccttggcaatgtctctgcccagattgcatactctaagatctccaagcgctggaacttccccagccctttctaccgcctgcacttcaagatcccacagaccaatgtgtctgtggccatttttatgctggacacagtgacactatgtggcaactcagatgacttcctcagccagcagcctgagaggccccgagacgtgaagctggcccgcacacagctgtcctggctcaagaaacagctggcggcggccagggaggactacgtgctggtggctggccactaccccgtgtggtccatagccgagcacgggcctacccactgcctggtcaagcagctacggccactgctggccacatacggggtcactgcctacctgtgcggccacgatcacaatctgcagtacctgcaagatgagaatggcgtgggctacgtgctgagtggggctgggaatttcatggacccctcaaagcggcaccagcgcaaggtccccaacggctatctgcgcttccactatgggactgaagactcactgggtggctttgcctatgtggagatcagctccaaagagatgactgtcacttacatcgaggcctcgggcaagtccctctttaagaccaggctgccgaggcgagccaggccctgaactcccatgactgcccagctctgaggcccgatctccactgttgggtgggtggcctgccgggaccctgctcacaggcaggcttttcctccaacctgtggcgctgcagcagggcaggaaggggaaacacagctgatgaactgtggtgccacatgacccttgtggcacagatgcccacgtatgtgaaacacacatggacatgtgtcccagccacagtgttatgctctgtggctggctcacctttgctgagttccggggtgcaatgggggagggagggagggaaagcttcctcctaaatcaagcatctttctgttactgatgttcaataaaagaatagttgccaaggctg

SEQ ID NO: 128 - protein, 325 aa, Human
MDMWTALLILQALLLPSLADGATPALRFVAVGDWGGVPNAPFHTAREMANAKEIARTVQILGADFILSLGDNFYFTGVQDINDKRFQETFEDVFSDRSLRKVPWYVLAGNHDHLGNVSAQIAYSKISKRWNFPSPFYRLHFKIPQTNVSVAIFMLDTVTLCGNSDDFLSQQPERPRDVKLARTQLSWLKKQLAAAREDYVLVAGHYPVWSIAEHGPTHCLVKQLRPLLATYGVTAYLCGHDHNLQYLQDENGVGYVLSGAGNFMDPSKRHQRKVPNGYLRFHYGTEDSLGGFAYVEISSKEMTVTYIEASGKSLFKTRLPRRARP

SEQ ID NO: 129 - DNA, 4407 bp, Human
tttcgactcgcgctccggctgctgtcacttggctctctggctggagcttgaggacgcaaggagggtttgtcactggcagactcgagactgtaggcactgccatggcccctgtgctcagtaaggactcggcggacatcgagagtatcctggctttaaatcctcgaacacaaactcatgcaactctgtgttccacttcggccaagaaattagacaagaaacattggaaaagaaatcctgataagaactgctttaattgtgagaagctggagaataattttgatgacatcaagcacacgactcttggtgagcgaggagctctccgagaagcaatgagatgcctgaaatgtgcagatgccccgtgtcagaagagctgtccaactaatcttgatattaaatcattcatcacaagtattgcaaacaagaactattatggagctgctaagatgatattttctgacaacccacttggtctgacttgtggaatggtatgtccaacctctgatctatgtgtaggtggatgcaatttatatgccactgaagagggacccattaatattggtggattgcagcaatttgctactgaggtattcaaagcaatgagtatcccacagatcagaaatccttcgctgcctcccccagaaaaaatgtctgaagcctattctgcaaagattgctctttttggtgctgggcctgcaagtataagttgtgcttcctttttggctcgattggggtactctgacatcactatatttgaaaaacaagaatatgttggtggtttaagtacttctgaaattcctcagttccggctgccgtatgatgtagtgaattttgagattgagctaatgaaggaccttggtgtaaagataatttgcggtaaaagcctttcagtgaatgaaatgactcttagcactttgaaagaaaaaggctacaaagctgctttcattggaataggtttgccagaacccaataaagatgccatcttccaaggcctgacgcaggaccaggggttttatacatccaaagactttttgccacttgtagccaaaggcagtaaagcaggaatgtgcgcctgtcactctccattgccatcgatacggggagtcgtgattgtacttggagctggagacactgccttcgactgtgcaacatctgctctacgttgtggagctcgccgagtgttcatcgtcttcagaaaaggctttgttaatataagagctgtccctgaggagatggagcttgctaaggaagaaaagtgtgaatttctgccattcctgtccccacggaaggttatagtaaaaggtgggagaattgttgctatgcagtttgttcggacagagcaagatgaaactggaaaatggaatgaagatgaagatcagatggtccatctgaaagccgatgtggtcatcagtgcctttggttcagttctgagtgatcctaaagtaaaagaagccttgagccctataaaatttaacagatggggtctcccagaagtagatccagaaactatgcaaactagtgaagcatgggtatttgcaggtggtgatgtcgttggtttggctaacactacagtggaatcggtgaatgatggaaagcaagcttcttggtacattcacaaatacgtacagtcacaatatggagcttccgtttctgccaagcctgaactacccctcttttacactcctattgatctggtggacattagtgtagaaatggccggattgaagtttataaatccttttggtcttgctagcgcaactccagccaccagcacatcaatgattcgaagagcttttgaagctggatggggttttgccctcaccaaaactttctctcttgataaggacattgtgacaaatgtttcccccagaatcatccggggaaccacctctggccccatgtatggccctggacaaagctcctttctgaatattgagctcatcagtgagaaaacggctgcatattggtgtcaaagtgtcactgaactaaaggctgacttcccagacaacattgtgattgctagcattatgtgcagttacaataaaaatgactggacggaacttgccaagaagtctgaggattctggagcagatgccctggagttaaatttatcatgtccacatggcatgggagaaagaggaatgggcctggcctgtgggcaggatccagagctggtgcggaacatctgccgctgggttaggcaagctgttcagattcctttttttgccaagctgaccccaaatgtcactgatattgtgagcatcgcaagagctgcaaaggaaggtggtgccaatggcgttacagccaccaacactgtctcaggtctgatgggattaaaatctgatggcacaccttggccagcagtggggattgcaaagcgaactacatatggaggagtgtctgggacagcaatcagacctattgctttgagagctgtgacctccattgctcgtgctctgcctggatttcccattttggctactggtggaattgactctgctgaaagtggtcttcagtttctccatagtggtgcttccgtcctccaggtatgcagtgccattcagaatcaggatttcactgtgatcgaagactactgcactggcctcaaagccctgctttatctgaaaagcattgaagaactacaagactgggatggacagagtccagctactgtgagtcaccagaaagggaaaccagttccacgtatagctgaactcatggacaagaaactgccaagttttggaccttatctggaacagcgcaagaaaatcatagcagaaaacaagattagactgaaagaacaaaatgtagctttttcaccacttaagagaagctgttttatccccaaaaggcctattcctaccatcaaggatgtaataggaaaagcactgcagtaccttggaacatttggtgaattgagcaacgtagagcaagttgtggctatgattgatgaagaaatgtgtatcaactgtggtaaatgctacatgacctgtaatgattctggctaccaggctatacagtttgatccagaaacccacctgcccaccataaccgacacttgtacaggctgtactctgtgtctcagtgtttgccctattgtcgactgcatcaaaatggtttccaggacaacaccttatgaaccaaagagaggcgtacccttatctgtgaatccggtgtgttaaggtgatttgtgaaacagttgctgtgaactttcatgtcacctacatatgctgatctcttaaaatcatgatccttgtgttcagctctttccaaattaaaacaaatatacattttctaaataaaaatatgtaatttcaaaatacatttgtaagtgtaaaaaatgtctcatgtcaatgaccattcaattagtggcataaaatagaataattcttttctgaggatagtagttaaataactgtgtggcagttaattggatgttcactgccagttgtcttatgtgaaaaattaactttttgtgtggcaattagtgtgacagtttccaaattgccctatgctgtgctccatatttgatttctaattgtaagtgaaattaagcattttgaaacaaagtactctttaacatacaagaaaatgtatccaaggaaacattttatcaataaaaattacctttaattttaatgctgtttctaagaaaatgtagttagctccataaagtacaaatgaagaaagtcaaaaattatttgctatggcaggataagaaagcctaaaattgagtttgtggactttattaagtaaaatccccttcgctgaaattgcttatttttggtgttggatagaggatagggagaatatttactaactaaataccattcactactcatgcgtgagatgggtgtacaaactcatcctcttttaatggcatttctctttaaactatgttcctaaccaaatgagatgataggatagatcctggttaccactcttttactgtgcacatatgggccccggaattctttaatagtcaccttcatgattatagcaactaatgtttgaacaaagctcaaagtatgcaatgcttcattattcaagaatgaaaaatataatgttgataatatatattaagtgtgccaaatcagtttgactactctctgttttagtgtttatgtttaaaagaaatatattttttgttattattagataatatttttgtatttctctattttcataatcagtaaatagtgtcatataaactcatttatctcctcttcatggcatcttcaatatgaatctataagtagtaaatcagaaagtaacaatctatggcttatttctatgacaaattcaagagctagaaaaataaaatgtttcattatgcacttttagaaatgcatatttgccacaaaacctgtattactgaataatatcaaataaaatatcataaagcatttt

SEQ ID NO: 130 - protein, 1025 aa, Human
MAPVLSKDSADIESILALNPRTQTHATLCSTSAKKLDKKHWKRNPDKNCFNCEKLENNFDDIKHTTLGERGALREAMRCLKCADAPCQKSCPTNLDIKSFITSIANKNYYGAAKMIFSDNPLGLTCGMVCPTSDLCVGGCNLYATEEGPINIGGLQQFATEVFKAMSIPQIRNPSLPPPEKMSEAYSAKIALFGAGPASISCASFLARLGYSDITIFEKQEYVGGLSTSEIPQFRLPYDVVNFEIELMKDLGVKIICGKSLSVNEMTLSTLKEKGYKAAFIGIGLPEPNKDAIFQGLTQDQGFYTSKDFLPLVAKGSKAGMCACHSPLPSIRGVVIVLGAGDTAFDCATSALRCGARRVFIVFRKGFVNIRAVPEEMELAKEEKCEFLPFLSPRKVIVKGGRIVAMQFVRTEQDETGKWNEDEDQMVHLKADVVISAFGSVLSDPKVKEALSPIKFNRWGLPEVDPETMQTSEAWVFAGGDVVGLANTTVESVNDGKQASWYIHKYVQSQYGASVSAKPELPLFYTPIDLVDISVEMAGLKFINPFGLASATPATSTSMIRRAFEAGWGFALTKTFSLDKDIVTNVSPRIIRGTTSGPMYGPGQSSFLNIELISEKTAAYWCQSVTELKADFPDNIVIASIMCSYNKNDWTELAKKSEDSGADALELNLSCPHGMGERGMGLACGQDPELVRNICRWVRQAVQIPFFAKLTPNVTDIVSIARAAKEGGANGVTATNTVSGLMGLKSDGTPWPAVGIAKRTTYGGVSGTAIRPIALRAVTSIARALPGFPILATGGIDSAESGLQFLHSGASVLQVCSAIQNQDFTVIEDYCTGLKALLYLKSIEELQDWDGQSPATVSHQKGKPVPRIAELMDKKLPSFGPYLEQRKKIIAENKIRLKEQNVAFSPLKRSCFIPKRPIPTIKDVIGKALQYLGTFGELSNVEQVVAMIDEEMCINCGKCYMTCNDSGYQAIQFDPETHLPTITDTCTGCTLCLSVCPIVDCIKMVSRTTPYEPKRGVPLSVNPVC

SEQ ID NO: 131 - DNA, 4465 bp, Human
caattgtcatacgacttgcagtgagcgtcaggagcacgtccaggaactcctcagcagcgcctccttcagctccacagccagacgccctcagacagcaaagcctacccccgcgccgcgccctgcccgccgctcggatgctcgcccgcgccctgctgctgtgcgcggtcctggcgctcagccatacagcaaatccttgctgttcccacccatgtcaaaaccgaggtgtatgtatgagtgtgggatttgaccagtataagtgcgattgtacccggacaggattctatggagaaaactgctcaacaccggaatttttgacaagaataaaattatttctgaaacccactccaaacacagtgcactacatacttacccacttcaagggattttggaacgttgtgaataacattcccttccttcgaaatgcaattatgagttatgtcttgacatccagatcacatttgattgacagtccaccaacttacaatgctgactatggctacaaaagctgggaagccttctctaacctctcctattatactagagcccttcctcctgtgcctgatgattgcccgactcccttgggtgtcaaaggtaaaaagcagcttcctgattcaaatgagattgtggaaaaattgcttctaagaagaaagttcatccctgatccccagggctcaaacatgatgtttgcattctttgcccagcacttcacgcatcagtttttcaagacagatcataagcgagggccagctttcaccaacgggctgggccatggggtggacttaaatcatatttacggtgaaactctggctagacagcgtaaactgcgccttttcaaggatggaaaaatgaaatatcagataattgatggagagatgtatcctcccacagtcaaagatactcaggcagagatgatctaccctcctcaagtccctgagcatctacggtttgctgtggggcaggaggtctttggtctggtgcctggtctgatgatgtatgccacaatctggctgcgggaacacaacagagtatgcgatgtgcttaaacaggagcatcctgaatggggtgatgagcagttgttccagacaagcaggctaatactgataggagagactattaagattgtgattgaagattatgtgcaacacttgagtggctatcacttcaaactgaaatttgacccagaactacttttcaacaaacaattccagtaccaaaatcgtattgctgctgaatttaacaccctctatcactggcatccccttctgcctgacacctttcaaattcatgaccagaaatacaactatcaacagtttatctacaacaactctatattgctggaacatggaattacccagtttgttgaatcattcaccaggcaaattgctggcagggttgctggtggtaggaatgttccacccgcagtacagaaagtatcacaggcttccattgaccagagcaggcagatgaaataccagtcttttaatgagtaccgcaaacgctttatgctgaagccctatgaatcatttgaagaacttacaggagaaaaggaaatgtctgcagagttggaagcactctatggtgacatcgatgctgtggagctgtatcctgcccttctggtagaaaagcctcggccagatgccatctttggtgaaaccatggtagaagttggagcaccattctccttgaaaggacttatgggtaatgttatatgttctcctgcctactggaagccaagcacttttggtggagaagtgggttttcaaatcatcaacactgcctcaattcagtctctcatctgcaataacgtgaagggctgtccctttacttcattcagtgttccagatccagagctcattaaaacagtcaccatcaatgcaagttcttcccgctccggactagatgatatcaatcccacagtactactaaaagaacgttcgactgaactgtagaagtctaatgatcatatttatttatttatatgaaccatgtctattaatttaattatttaataatatttatattaaactccttatgttacttaacatcttctgtaacagaagtcagtactcctgttgcggagaaaggagtcatacttgtgaagacttttatgtcactactctaaagattttgctgttgctgttaagtttggaaaacagtttttattctgttttataaaccagagagaaatgagttttgacgtctttttacttgaatttcaacttatattataagaacgaaagtaaagatgtttgaatacttaaacactatcacaagatggcaaaatgctgaaagtttttacactgtcgatgtttccaatgcatcttccatgatgcattagaagtaactaatgtttgaaattttaaagtacttttggttatttttctgtcatcaaacaaaaacaggtatcagtgcattattaaatgaatatttaaattagacattaccagtaatttcatgtctactttttaaaatcagcaatgaaacaataatttgaaatttctaaattcatagggtagaatcacctgtaaaagcttgtttgatttcttaaagttattaaacttgtacatataccaaaaagaagctgtcttggatttaaatctgtaaaatcagatgaaattttactacaattgcttgttaaaatattttataagtgatgttcctttttcaccaagagtataaacctttttagtgtgactgttaaaacttccttttaaatcaaaatgccaaatttattaaggtggtggagccactgcagtgttatctcaaaataagaatattttgttgagatattccagaatttgtttatatggctggtaacatgtaaaatctatatcagcaaaagggtctacctttaaaataagcaataacaaagaagaaaaccaaattattgttcaaatttaggtttaaacttttgaagcaaacttttttttatccttgtgcactgcaggcctggtactcagattttgctatgaggttaatgaagtaccaagctgtgcttgaataacgatatgttttctcagattttctgttgtacagtttaatttagcagtccatatcacattgcaaaagtagcaatgacctcataaaatacctcttcaaaatgcttaaattcatttcacacattaattttatctcagtcttgaagccaattcagtaggtgcattggaatcaagcctggctacctgcatgctgttccttttcttttcttcttttagccattttgctaagagacacagtcttctcatcacttcgtttctcctattttgttttactagttttaagatcagagttcactttctttggactctgcctatattttcttacctgaacttttgcaagttttcaggtaaacctcagctcaggactgctatttagctcctcttaagaagattaaaagagaaaaaaaaaggcccttttaaaaatagtatacacttattttaagtgaaaagcagagaattttatttatagctaattttagctatctgtaaccaagatggatgcaaagaggctagtgcctcagagagaactgtacggggtttgtgactggaaaaagttacgttcccattctaattaatgccctttcttatttaaaaacaaaaccaaatgatatctaagtagttctcagcaataataataatgacgataatacttcttttccacatctcattgtcactgacatttaatggtactgtatattacttaatttattgaagattattatttatgtcttattaggacactatggttataaactgtgtttaagcctacaatcattgatttttttttgttatgtcacaatcagtatattttctttggggttacctctctgaatattatgtaaacaatccaaagaaatgattgtattaagatttgtgaataaatttttagaaatctgattggcatattgagatatttaaggttgaatgtttgtccttaggataggcctatgtgctagcccacaaagaatattgtctcattagcctgaatgtgccataagactgaccttttaaaatgttttgagggatctgtggatgcttcgttaatttgttcagccacaatttattgagaaaatattctgtgtcaagcactgtgggttttaatatttttaaatcaaacgctgattacagataatagtatttatataaataattgaaaaaaattttcttttgggaagagggagaaaatgaaataaatatcattaaagataactcaggagaatcttctttacaattttacgtttagaatgtttaaggttaagaaagaaatagtcaatatgcttgtataaaacactgttcactgttttttttaaaaaaaaaacttgatttgttattaacattgatctgctgacaaaacctgggaatttgggttgtgtatgcgaatgtttcagtgcctcagacaaatgtgtatttaacttatgtaaaagataagtctggaaataaatgtctgtttatttttgtactattta

SEQ ID NO: 132 - protein, 604 aa, Human
MLARALLLCAVLALSHTANPCCSHPCQNRGVCMSVGFDQYKCDCTRTGFYGENCSTPEFLTRIKLFLKPTPNTVHYILTHFKGFWNVVNNIPFLRNAIMSYVLTSRSHLIDSPPTYNADYGYKSWEAFSNLSYYTRALPPVPDDCPTPLGVKGKKQLPDSNEIVEKLLLRRKFIPDPQGSNMMFAFFAQHFTHQFFKTDHKRGPAFTNGLGHGVDLNHIYGETLARQRKLRLFKDGKMKYQIIDGEMYPPTVKDTQAEMIYPPQVPEHLRFAVGQEVFGLVPGLMMYATIWLREHNRVCDVLKQEHPEWGDEQLFQTSRLILIGETIKIVIEDYVQHLSGYHFKLKFDPELLFNKQFQYQNRIAAEFNTLYHWHPLLPDTFQIHDQKYNYQQFIYNNSILLEHGITQFVESFTRQIAGRVAGGRNVPPAVQKVSQASIDQSRQMKYQSFNEYRKRFMLKPYESFEELTGEKEMSAELEALYGDIDAVELYPALLVEKPRPDAIFGETMVEVGAPFSLKGLMGNVICSPAYWKPSTFGGEVGFQIINTASIQSLICNNVKGCPFTSFSVPDPELIKTVTINASSSRSGLDDINPTVLLKERSTEL

SEQ ID NO: 133 - DNA, 1600 bp, Human
gccccgccgccggcagtggaccgctgtgcgcgaaccctgaaccctacggtcccgacccgcgggcgaggccgggtacctgggctgggatccggagcaagcgggcgagggcagcgccctaagcaggcccggagcgatggcagccttgatgaccccgggaaccggggccccacccgcgcctggtgacttctccggggaagggagccagggacttcccgacccttcgccagagcccaagcagctcccggagctgatccgcatgaagcgagacggaggccgcctgagcgaagcggacatcaggggcttcgtggccgctgtggtgaatgggagcgcgcagggcgcacagatcggggccatgctgatggccatccgacttcggggcatggatctggaggagacctcggtgctgacccaggccctggctcagtcgggacagcagctggagtggccagaggcctggcgccagcagcttgtggacaagcattccacagggggtgtgggtgacaaggtcagcctggtcctcgcacctgccctggcggcatgtggctgcaaggtgccaatgatcagcggacgtggtctggggcacacaggaggcaccttggataagctggagtctattcctggattcaatgtcatccagagcccagagcagatgcaagtgctgctggaccaggcgggctgctgtatcgtgggtcagagtgagcagctggttcctgcggacggaatcctatatgcagccagagatgtgacagccaccgtggacagcctgccactcatcacagcctccattctcagtaagaaactcgtggaggggctgtccgctctggtggtggacgttaagttcggaggggccgccgtcttccccaaccaggagcaggcccgggagctggcaaagacgctggttggcgtgggagccagcctagggcttcgggtcgcggcagcgctgaccgccatggacaagcccctgggtcgctgcgtgggccacgccctggaggtggaggaggcgctgctctgcatggacggcgcaggcccgccagacttaagggacctggtcaccacgctcgggggcgccctgctctggctcagcggacacgcggggactcaggctcagggcgctgcccgggtggccgcggcgctggacgacggctcggcccttggccgcttcgagcggatgctggcggcgcagggcgtggatcccggtctggcccgagccctgtgctcgggaagtcccgcagaacgccggcagctgctgcctcgcgcccgggagcaggaggagctgctggcgcccgcagatggcaccgtggagctggtccgggcgctgccgctggcgctggtgctgcacgagctcggggccgggcgcagccgcgctggggagccgctccgcctgggggtgggcgcagagctgctggtcgacgtgggtcagaggctgcgccgtgggaccccctggctccgcgtgcaccgggacggccccgcgctcagcggcccgcagagccgcgccctgcaggaggcgctcgtactctccgaccgcgcgccattcgccgccccctcgcccttcgcagagctcgttctgccgccgcagcaataaagctcctttgccgcgaaa

SEQ ID NO: 134 - protein, 482 aa, Human
MAALMTPGTGAPPAPGDFSGEGSQGLPDPSPEPKQLPELIRMKRDGGRLSEADIRGFVAAVVNGSAQGAQIGAMLMAIRLRGMDLEETSVLTQALAQSGQQLEWPEAWRQQLVDKHSTGGVGDKVSLVLAPALAACGCKVPMISGRGLGHTGGTLDKLESIPGFNVIQSPEQMQVLLDQAGCCIVGQSEQLVPADGILYAARDVTATVDSLPLITASILSKKLVEGLSALVVDVKFGGAAVFPNQEQARELAKTLVGVGASLGLRVAAALTAMDKPLGRCVGHALEVEEALLCMDGAGPPDLRDLVTTLGGALLWLSGHAGTQAQGAARVAAALDDGSALGRFERMLAAQGVDPGLARALCSGSPAERRQLLPRAREQEELLAPADGTVELVRALPLALVLHELGAGRSRAGEPLRLGVGAELLVDVGQRLRRGTPWLRVHRDGPALSGPQSRALQEALVLSDRAPFAAPSPFAELVLPPQQ

SEQ ID NO: 135 - DNA, 6133 bp, Human
tgcatgaagacaaaaggtcctgtgctcacctgggacccttctggacgttgccctgtgtacctcttcgactgcctgttcatctacgacgaaccccgggtattgaccccagacaacaatgccacttcatattggggacttcgtctgggattccaaggtgcattcattgcaaagttccttaaatattttctcactgcttcctactaaaggacggacagagcatttgttcttcagccacatactttccttccactggccagcattctcctctattagactagaactgtggataaacctcagaaaatggccacccagcagaaagcctctgacgagaggatctcccagtttgatcacaatttgctgccagagctgtctgctcttctgggcctagatgcagttcagttggcaaaggaactagaagaagaggagcagaaggagcgagcaaaaatgcagaaaggctacaactctcaaatgcgcagtgaagcaaaaaggttaaagacttttgtgacttatgagccgtacagctcatggataccacaggagatggcggccgctgggttttacttcactggggtaaaatctgggattcagtgcttctgctgtagcctaatcctctttggtgccggcctcacgagactccccatagaagaccacaagaggtttcatccagattgtgggttccttttgaacaaggatgttggtaacattgccaagtacgacataagggtgaagaatctgaagagcaggctgagaggaggtaaaatgaggtaccaagaagaggaggctagacttgcgtccttcaggaactggccattttatgtccaagggatatccccttgtgtgctctcagaggctggctttgtctttacaggtaaacaggacacggtacagtgtttttcctgtggtggatgtttaggaaattgggaagaaggagatgatccttggaaggaacatgccaaatggttccccaaatgtgaatttcttcggagtaagaaatcctcagaggaaattacccagtatattcaaagctacaagggatttgttgacataacgggagaacattttgtgaattcctgggtccagagagaattacctatggcatcagcttattgcaatgacagcatctttgcttacgaagaactacggctggactcttttaaggactggccccgggaatcagctgtgggagttgcagcactggccaaagcaggtcttttctacacaggtataaaggacatcgtccagtgcttttcctgtggagggtgtttagagaaatggcaggaaggtgatgacccattagacgatcacaccagatgttttcccaattgtccatttctccaaaatatgaagtcctctgcggaagtgactccagaccttcagagccgtggtgaactttgtgaattactggaaaccacaagtgaaagcaatcttgaagattcaatagcagttggtcctatagtgccagaaatggcacagggtgaagcccagtggtttcaagaggcaaagaatctgaatgagcagctgagagcagcttataccagcgccagtttccgccacatgtctttgcttgatatctcttccgatctggccacggaccacttgctgggctgtgatctgtctattgcttcaaaacacatcagcaaacctgtgcaagaacctctggtgctgcctgaggtctttggcaacttgaactctgtcatgtgtgtggagggtgaagctggaagtggaaagacggtcctcctgaagaaaatagcttttctgtgggcatctggatgctgtcccctgttaaacaggttccagctggttttctacctctcccttagttccaccagaccagacgaggggctggccagtatcatctgtgaccagctcctagagaaagaaggatctgttactgaaatgtgcatgaggaacattatccagcagttaaagaatcaggtcttattccttttagatgactacaaagaaatatgttcaatccctcaagtcataggaaaactgattcaaaaaaaccacttatcccggacctgcctattgattgctgtccgtacaaacagggccagggacatccgccgatacctagagaccattctagagatcaaagcatttcccttttataatactgtctgtatattacggaagctcttttcacataatatgactcgtctgcgaaagtttatggtttactttggaaagaaccaaagtttgcagaagatacagaaaactcctctctttgtggcggcgatctgtgctcattggtttcagtatccttttgacccatcctttgatgatgtggctgttttcaagtcctatatggaacgcctttccttaaggaacaaagcgacagctgaaattctcaaagcaactgtgtcctcctgtggtgagctggccttgaaagggtttttttcatgttgctttgagtttaatgatgatgatctcgcagaagcaggggttgatgaagatgaagatctaaccatgtgcttgatgagcaaatttacagcccagagactaagaccattctaccggtttttaagtcctgccttccaagaatttcttgcggggatgaggctgattgaactcctggattcagataggcaggaacatcaagatttgggactgtatcatttgaaacaaatcaactcacccatgatgactgtaagcgcctacaacaattttttgaactatgtctccagcctcccttcaacaaaagcagggcccaaaattgtgtctcatttgctccatttagtggataacaaagagtcattggagaatatatctgaaaatgatgactacttaaagcaccagccagaaatttcactgcagatgcagttacttaggggattgtggcaaatttgtccacaagcttacttttcaatggtttcagaacatttactggttcttgccctgaaaactgcttatcaaagcaacactgttgctgcgtgttctccatttgttttgcaattccttcaagggagaacactgactttgggtgcgcttaacttacagtactttttcgaccacccagaaagcttgtcattgttgaggagcatccacttcccaatacgaggaaataagacatcacccagagcacatttttcagttctggaaacatgttttgacaaatcacaggtgccaactatagatcaggactatgcttctgcctttgaacctatgaatgaatgggagcgaaatttagctgaaaaagaggataatgtaaagagctatatggatatgcagcgcagggcatcaccagaccttagtactggctattggaaactttctccaaagcagtacaagattccctgtctagaagtcgatgtgaatgatattgatgttgtaggccaggatatgcttgagattctaatgacagttttctcagcttcacagcgcatcgaactccatttaaaccacagcagaggctttatagaaagcatccgcccagctcttgagctgtctaaggcctctgtcaccaagtgctccataagcaagttggaactcagcgcagccgaacaggaactgcttctcaccctgccttccctggaatctcttgaagtctcagggacaatccagtcacaagaccaaatctttcctaatctggataagttcctgtgcctgaaagaactgtctgtggatctggagggcaatataaatgttttttcagtcattcctgaagaatttccaaacttccaccatatggagaaattattgatccaaatttcagctgagtatgatccttccaaactagtaaaattaattcaaaattctccaaaccttcatgttttccatctgaagtgtaacttcttttcggattttgggtctctcatgactatgcttgtttcctgtaagaaactcacagaaattaagttttcggattcattttttcaagccgtcccatttgttgccagtttgccaaattttatttctctgaagatattaaatcttgaaggccagcaatttcctgatgaggaaacatcagaaaaatttgcctacattttaggttctcttagtaacctggaagaattgatccttcctactggggatggaatttatcgagtggccaaactgatcatccagcagtgtcagcagcttcattgtctccgagtcctctcatttttcaagactttgaatgatgacagcgtggtggaaattgccaaagtagcaatcagtggaggtttccagaaacttgagaacctaaagctttcaatcaatcacaagattacagaggaaggatacagaaatttctttcaagcactggacaacatgccaaacttgcaggagttggacatctccaggcatttcacagagtgtatcaaagctcaggccacaacagtcaagtctttgagtcaatgtgtgttacgactaccaaggctcattagactgaacatgttaagttggctcttggatgcagatgatattgcattgcttaatgtcatgaaagaaagacatcctcaatctaagtacttaactattctccagaaatggatactgccgttctctccaatcattcagaaataaaagattcagctaaaaactgctgaatcaataatttgtcttggggcatattgaggatgtaaaaaaagttgttgattaatgctaaaaaccaaattatccaaaattattttattaaatattgcatacaaaagaaaatgtgtaaggcttgctaaaaaacaaaacaaaacaaaacacagtcctgcatactcaccaccaagctcaagaaataaatcatcaccaatacctttgaggtccctgagtaatccaccccagctaaaggcaaacccttcaatcaagtttatacagcaaaccctccattgtccatggtcaacagggaaggggttggggacaggtctgccaatctatctaaaagccacaatatggaagaagtattcaatttatataataaatggctaacttaacggttgaatcactttcatacatggatgaaacgggtttaacacaggatccacatgaatcttctgtgggccaagagatgttccttaatccttgtagaacctgttttctatattgaactagctttggtacagtagagttaacttactttccatttatccactgccaatataaagaggaaacaggggttagggaaaaatgacttcattccagaggcttctcagagttcaacatatgctataatttagaattttcttatgaatccactctacttgggtagaaaatattttatctctagtgattgcatattatttccatatcatagtatttcatagtattatatttgatatgagtgtctatatcaatgtcagtgtccagaatttcgttcctaccagttaagtagttttctgaacggccagaagaccattcgaaattcatgatactactataagttggtaaacaaccatacttttatcctcatttttattctcactaagaaaaaagtcaactcccctccccttgcccaagtatgaaatatagggacagtatgtatggtgtggtctcatttgtttagaaaaccacttatgactgggtgcggtggctcacacctgtaatcccagcactttgggaggctgaggcgggcgaatcatttgaggtgaggaattcgagaccagcctggccagcatggtgaaaccccatctctactaaaaatacaaaaattagccaggtgtggtggcacatgcctgtagtcccagccactagggcggctgagacgcaagacttgcttgaacccgggaggcagaggttgcagtgagccaagatggcgccactgcattccagcctgggcaacagagcaagaccctgtctgtctcaaaacaaaaaacaaaaccacttatattgctagctacattaagaatttctgaatatgttactgagcttgcttgtggtaaccatttataatatcagaaagtatatgtacaccaaaacatgttgaacatccatgttgtacaactgaaatataaataattttgtcaattatacctaaataaaactggaaaaaaatttctggaagtttatatctaaaaatgttaatagtgcgtacctctaggaagtgggcctggaagccattcttacttttcagtctctcccattctgtactgttttttgttttactttcgtgcctgcattatttttctatttaaaacaaaaataaatctagtttagcact

SEQ ID NO: 136 - protein, 1403 aa, Human
MATQQKASDERISQFDHNLLPELSALLGLDAVQLAKELEEEEQKERAKMQKGYNSQMRSEAKRLKTFVTYEPYSSWIPQEMAAAGFYFTGVKSGIQCFCCSLILFGAGLTRLPIEDHKRFHPDCGFLLNKDVGNIAKYDIRVKNLKSRLRGGKMRYQEEEARLASFRNWPFYVQGISPCVLSEAGFVFTGKQDTVQCFSCGGCLGNWEEGDDPWKEHAKWFPKCEFLRSKKSSEEITQYIQSYKGFVDITGEHFVNSWVQRELPMASAYCNDSIFAYEELRLDSFKDWPRESAVGVAALAKAGLFYTGIKDIVQCFSCGGCLEKWQEGDDPLDDHTRCFPNCPFLQNMKSSAEVTPDLQSRGELCELLETTSESNLEDSIAVGPIVPEMAQGEAQWFQEAKNLNEQLRAAYTSASFRHMSLLDISSDLATDHLLGCDLSIASKHISKPVQEPLVLPEVFGNLNSVMCVEGEAGSGKTVLLKKIAFLWASGCCPLLNRFQLVFYLSLSSTRPDEGLASIICDQLLEKEGSVTEMCMRNIIQQLKNQVLFLLDDYKEICSIPQVIGKLIQKNHLSRTCLLIAVRTNRARDIRRYLETILEIKAFPFYNTVCILRKLFSHNMTRLRKFMVYFGKNQSLQKIQKTPLFVAAICAHWFQYPFDPSFDDVAVFKSYMERLSLRNKATAEILKATVSSCGELALKGFFSCCFEFNDDDLAEAGVDEDEDLTMCLMSKFTAQRLRPFYRFLSPAFQEFLAGMRLIELLDSDRQEHQDLGLYHLKQINSPMMTVSAYNNFLNYVSSLPSTKAGPKIVSHLLHLVDNKESLENISENDDYLKHQPEISLQMQLLRGLWQICPQAYFSMVSEHLLVLALKTAYQSNTVAACSPFVLQFLQGRTLTLGALNLQYFFDHPESLSLLRSIHFPIRGNKTSPRAHFSVLETCFDKSQVPTIDQDYASAFEPMNEWERNLAEKEDNVKSYMDMQRRASPDLSTGYWKLSPKQYKIPCLEVDVNDIDVVGQDMLEILMTVFSASQRIELHLNHSRGFIESIRPALELSKASVTKCSISKLELSAAEQELLLTLPSLESLEVSGTIQSQDQIFPNLDKFLCLKELSVDLEGNINVFSVIPEEFPNFHHMEKLLIQISAEYDPSKLVKLIQNSPNLHVFHLKCNFFSDFGSLMTMLVSCKKLTEIKFSDSFFQAVPFVASLPNFISLKILNLEGQQFPDEETSEKFAYILGSLSNLEELILPTGDGIYRVAKLIIQQCQQLHCLRVLSFFKTLNDDSVVEIAKVAISGGFQKLENLKLSINHKITEEGYRNFFQALDNMPNLQELDISRHFTECIKAQATTVKSLSQCVLRLPRLIRLNMLSWLLDADDIALLNVMKERHPQSKYLTILQKWILPFSPIIQK

SEQ ID NO: 137 - DNA, 2032 bp, Human
cgcctggaccatgtgaatggggccagagggctcccgggctgggcagggaccatgggctgtggctgcagctcacacccggaagatgactggatggaaaacatcgatgtgtgtgagaactgccattatcccatagtcccactggatggcaagggcacgctgctcatccgaaatggctctgaggtgcgggacccactggttacctacgaaggctccaatccgccggcttccccactgcaagacaacctggttatcgctctgcacagctatgagccctctcacgacggagatctgggctttgagaagggggaaccactccgcatcctggagcagagcggcgagtggtggaaggcgcagtccctgaccacgggccaggaaggcttcatccccttcaattttgtggccaaagcgaacagcctggagcccgaaccctggttcttcaagaacctgagccgcaaggacgcggagcggcagctcctggcgcccgggaacactcacggctccttcctcatccgggagagcgagagcaccgccgggtccttttcactgtcggtccgggacttcgaccaaaaccagggagaggtggtgaaacattacaagatccgtaatctggacaacggtggcttctacatctcccctcgaatcacttttcccggcctgcatgaactggtccgccattacaccaatgcttcagatgggctgtgcacacggttgagccgcccctgccagacccagaagccccagaagccgtggtgggaggacgagtgggaggttcccagggagacgctgaagctggtggagcggctgggggctggacagttcggggaggtgtggatggggtactacaacgggcacacgaaggtggcggtgaagagcctgaagcagggcagcatgtccccggacgccttcctggccgaggccaacctcatgaagcagctgcaacaccagcggctggttcggctctacgctgtggtcacccaggagcccatctacatcatcactgaatacatggagaatgggagtctagtggattttctcaagaccccttcaggcatcaagttgaccatcaacaaactcctggacatggcagcccaaattgcagaaggcatggcattcattgaagagcggaattatattcatcgtgaccttcgggctgccaacattctggtgtctgacaccctgagctgcaagattgcagactttggcctagcacgcctcattgaggacaacgagtacacagccagggagggggccaagtttcccattaagtggacagcgccagaagccattaactacgggacattcaccatcaagtcagatgtgtggtcttttgggatcctgctgacggaaattgtcacccacggccgcatcccttacccagggatgaccaacccggaggtgattcagaacctggagcgaggctaccgcatggtgcgccctgacaactgtccagaggagctgtaccaactcatgaggctgtgctggaaggagcgcccagaggaccggcccacctttgactacctgcgcagtgtgctggaggacttcttcacggccacagagggccagtaccagcctcagccttgagaggaggccttgagaggccctggggttctccccctttctctccagcctgacttggggagatggagttcttgtgccatagtcacatggcctatgcacatatggactctgcacatgaatcccacccacatgtgacacatatgcaccttgtgtctgtacacgtgtcctgtagttgcgtggactctgcacatgtcttgtgcatgtgtagcctgtgcatgtatgtcttggacactgtacaaggtacccctttctggctctcccatttcctgagaccaccagagagaggggagaagcctgggattgacagaagcttctgcccacctacttttctttcctcagatcatccagaagttcctcaagggccaggactttatctaatacctctgtgtgctcctccttggtgcctggcctggcacacatcaggagttcaataaatgtctgttgatgactgccg

SEQ ID NO: 138 - protein, 509 aa, Human
MGCGCSSHPEDDWMENIDVCENCHYPIVPLDGKGTLLIRNGSEVRDPLVTYEGSNPPASPLQDNLVIALHSYEPSHDGDLGFEKGEPLRILEQSGEWWKAQSLTTGQEGFIPFNFVAKANSLEPEPWFFKNLSRKDAERQLLAPGNTHGSFLIRESESTAGSFSLSVRDFDQNQGEVVKHYKIRNLDNGGFYISPRITFPGLHELVRHYTNASDGLCTRLSRPCQTQKPQKPWWEDEWEVPRETLKLVERLGAGQFGEVWMGYYNGHTKVAVKSLKQGSMSPDAFLAEANLMKQLQHQRLVRLYAVVTQEPIYIITEYMENGSLVDFLKTPSGIKLTINKLLDMAAQIAEGMAFIEERNYIHRDLRAANILVSDTLSCKIADFGLARLIEDNEYTAREGAKFPIKWTAPEAINYGTFTIKSDVWSFGILLTEIVTHGRIPYPGMTNPEVIQNLERGYRMVRPDNCPEELYQLMRLCWKERPEDRPTFDYLRSVLEDFFTATEGQYQPQP

SEQ ID NO: 139 - DNA, 2639 bp, Human
gctgaaggctcggttcatgccgtgcccccgggcagttctggtgaggctaagcaagaggcctctgcatcttgacacctaggagagcagggacggagtctcccagggtggaggaccatgctgcgccgcaagccctccaatgccagtgagaaggagcccactcagaagaaaaagctctcccttcagcgctccagcagcttcaaggattttgccaaatccaaacccagctcccccgtggtgagcgagaaggagtttaatctggatgataacattccagaagatgactcaggtgtccccaccccagaagatgctgggaagagtggcaaaaagctggggaagaagtggagggcagtgatttcccgaaccatgaacaggaagatgggcaagatgatggtgaaggccctgtcagaagagatggcagacactctggaggagggctctgcctccccgacatctccagactacagcctggacagccctggccctgagaagatggcgctggccttttctgagcaagaggagcatgaacttccggtgctcagccgccaggcatcaacaggcagtgagctctgcagccccagcccaggttctggcagcttcggggaggaaccacctgccccccagtacacagggcctttctgtggccgggcacgagtccacaccgacttcactcccagcccctatgaccacgactcgctgaaactgcagaaaggagatgtgatccagatcattgaaaagccacctgtgggcacgtggctgggcctactcaatggcaaggtgggctctttcaaattcatctatgtggatgtgctgcccgaggaggccgtggggcatgcccgccccagccgccgacagagcaagggcaagaggcccaagcctaagaccctgcatgagctgctggagcgcatcggcctggaggagcacacatccaccctcctgctcaatggctaccagacactggaagacttcaaagagctgcgagaaacacacctcaatgagctgaacatcatggatccacagcaccgggccaagctgctcacggccgccgagctgctgctggactatgacactggcagtgaggaggctgaagagggcgccgagagcagccaggagccagtggcacacacagtgtcggaacccaaggtggacatcccgcgcgactcaggctgctttgagggctcggagagcgggcgcgatgacgcagagctggcaggcactgaggagcagctgcaaggcctctccctggccggggcaccttgaggtggcggtggcaataggccaaggctgggacccagctgcaaaggctgtaggagtgggcccagcctcccgtggtggcccaggtcctgaggactggcactgagcctggccctgcttccccagggacacttagggccacagaggccaggccagggccctacaggttccaggctcagctggagtggttggggagtcgcccaagggcacatcccacctgcctgagccccgccctccaccagcgactgacagcgcagcccctcctggcaccaactgctcccctgccatggccacggccacagcaagtggggcactgggaaaccctgcccatgtccctcaccaacaaggcctccaaatcctcctcacccccacaccacctacccctgtcgcactgctcctgaaaagggggccaagtcaatgtttcaggtcagtctaaaaaccctagggaagctggccatttaaaagaacccaaactgaccatgggtaaatccagttcccctaaataaggcctgaagaaatccacaggtaccattcccactttccttctccctagctttcttagaggtttggccactaaatcttatgagacttgaaccaagtggcttcctctttctaggcttaggacgggttggggttagaaagggtgatcactgaaggccttgcctgctctgacattctgtgacattaaatgtctattctcctgttacctgtggcctgggacaccagtggggtttatcgaggggaccagaggggcctcaggctttcagatgaaatggctcctcctactcacccactttattcctctccatgtaattcaggacaagctgcaacttcccccagcttaacacaatgcccatacctcatacgatatgcgccctcccgttccatccctggccccctcaaacgagacttctcacaaggctgattacagatggtcaaacctggcttccaaggacagaattgcctctcggaagccagctgtggatctgagtccagagttggccacttgtgtgggtcctcacaagcaaagagagcactaaacttgacattgggggtccaccactccaactttgctttctgaaggttttggtgtacattgagccccagaaggaaaggagagtatctgtgagtgggggcctcccttgaccccagtacgaagtctatgccctgaatccccagagtagcccttcctggtgcccaactggcctggggacaaacagcgtccactacatctaggactgccggctaagtggacacacttcttgacctcctaccaggaactttggtaaaagctagctttggggaaggggttgggtgtaaatatgagagggtggagggagaccagctggtagcaataaacatgggtagaactaaaaaaaaaaaaaaaa

SEQ ID NO: 140 - DNA, 1824 bp, Human
cagctctctgtcagaatggccaccatggtaccatccgtgttgtggcccagggcctgctggactctgctggtctgctgtctgctgaccccaggtgtccaggggcaggagttccttttgcgggtggagccccagaaccctgtgctctctgctggagggtccctgtttgtgaactgcagtactgattgtcccagctctgagaaaatcgccttggagacgtccctatcaaaggagctggtggccagtggcatgggctgggcagccttcaatctcagcaacgtgactggcaacagtcggatcctctgctcagtgtactgcaatggctcccagataacaggctcctctaacatcaccgtgtacgggctcccggagcgtgtggagctggcacccctgcctccttggcagccggtgggccagaacttcaccctgcgctgccaagtggagggtgggtcgccccggaccagcctcacggtggtgctgcttcgctgggaggaggagctgagccggcagcccgcagtggaggagccagcggaggtcactgccactgtgctggccagcagagacgaccacggagcccctttctcatgccgcacagaactggacatgcagccccaggggctgggactgttcgtgaacacctcagccccccgccagctccgaacctttgtcctgcccgtgacccccccgcgcctcgtggccccccggttcttggaggtggaaacgtcgtggccggtggactgcaccctagacgggctttttccagcctcagaggcccaggtctacctggcgctgggggaccagatgctgaatgcgacagtcatgaaccacggggacacgctaacggccacagccacagccacggcgcgcgcggatcaggagggtgcccgggagatcgtctgcaacgtgaccctagggggcgagagacgggaggcccgggagaacttgacggtctttagcttcctaggacccattgtgaacctcagcgagcccaccgcccatgaggggtccacagtgaccgtgagttgcatggctggggctcgagtccaggtcacgctggacggagttccggccgcggccccggggcagccagctcaacttcagctaaatgctaccgagagtgacgacggacgcagcttcttctgcagtgccactctcgaggtggacggcgagttcttgcacaggaacagtagcgtccagctgcgagtcctgtatggtcccaaaattgaccgagccacatgcccccagcacttgaaatggaaagataaaacgagacacgtcctgcagtgccaagccaggggcaacccgtaccccgagctgcggtgtttgaaggaaggctccagccgggaggtgccggtggggatcccgttcttcgtcaacgtaacacataatggtacttatcagtgccaagcgtccagctcacgaggcaaatacaccctggtcgtggtgatggacattgaggctgggagctcccactttgtccccgtcttcgtggcggtgttactgaccctgggcgtggtgactatcgtactggccttaatgtacgtcttcagggagcaccaacggagcggcagttaccatgttagggaggagagcacctatctgcccctcacgtctatgcagccgacagaagcaatgggggaagaaccgtccagagctgagtgacgctgggatccgggatcaaagttggcgggggcttggctgtgccctcagattccgcaccaataaagccttcaaactccctaaaaaaaaaaaaaaaaaaaaaaaaaaaaaaaaaaaaaaaaaaaaaaaaaaaaaaaaaaaaaaaaaaaaaaaaaaaaaaaaaaaaaa

SEQ ID NO: 141 - protein, 547 aa, Human
MATMVPSVLWPRACWTLLVCCLLTPGVQGQEFLLRVEPQNPVLSAGGSLFVNCSTDCPSSEKIALETSLSKELVASGMGWAAFNLSNVTGNSRILCSVYCNGSQITGSSNITVYGLPERVELAPLPPWQPVGQNFTLRCQVEGGSPRTSLTVVLLRWEEELSRQPAVEEPAEVTATVLASRDDHGAPFSCRTELDMQPQGLGLFVNTSAPRQLRTFVLPVTPPRLVAPRFLEVETSWPVDCTLDGLFPASEAQVYLALGDQMLNATVMNHGDTLTATATATARADQEGAREIVCNVTLGGERREARENLTVFSFLGPIVNLSEPTAHEGSTVTVSCMAGARVQVTLDGVPAAAPGQPAQLQLNATESDDGRSFFCSATLEVDGEFLHRNSSVQLRVLYGPKIDRATCPQHLKWKDKTRHVLQCQARGNPYPELRCLKEGSSREVPVGIPFFVNVTHNGTYQCQASSSRGKYTLVVVMDIEAGSSHFVPVFVAVLLTLGVVTIVLALMYVFREHQRSGSYHVREESTYLPLTSMQPTEAMGEEPSRAE

SEQ ID NO: 142 - DNA, 1516 bp, Human
gccggctacaggaaattgacttaggcacaggaacttgctaatctcttttgtcacattcggattgctcctgctgccccacacacactaacccaaccatcttggggtggactccctgccagcccaactgttgtattttcagttcttccagtgtgaatcagttaatattctcgggaacgagggagaggttgatcctatgaggaaatcaaccacagtgaaaaggcttgggccgcttttgttttcacctgcttttgttgaacaaatttgatttccggagtcagtcattttactgtcaagacatttcttcggcattctgcaacagtttccaacatggctagatccatcagaaactgaagccgtggagaacgctctcggggcctttgccacttcttggagtagaagccgacagagagctgtttggaaacttctccttcacacaccagttgaagactaggctttggaggttttcaaagcagacggtgcttggatgggcagggagaagtaacattctgcaaatcgccgtcagaggtcctgaggacacagacctacctggcttgcattccccttgctgaatggcgtgtgctgcagctgcccactgagggctcttttccctgggattctggacttcagagtaggacagcaggctgggaagatgctgagttccatcaagtgcgtgttggtgggcgactctgctgtggggaaaacctctctgttggtgcgcttcacctccgagaccttcccggaggcctacaagcccacagtgtacgagaacacaggggtggacgtcttcatggatggcatccagatcagcctgggcctctgggacacagccggcaatgacgccttcagaagcatccggcccctgtcctaccagcaggcagacgtggtgctgatgtgctactctgtggccaaccataactcattcctgaacttgaagaacaagtggattggtgaaattaggagcaacttgccctgtacccctgtgctggtggtggccacccagactgaccagcgggagatggggccccacagggcctcctgcgtcaatgccatggaagggaagaaactggcccaggatgtcagagccaagggctacctggagtgctcagcccttagcaatcggggagtacagcaggtgtttgagtgcgccgtccgaactgccgtcaaccaggccaggagacgaaacagaaggaggctcttctccatcaatgagtgcaagatcttctaaaccccaagagacttcacacaacacttatgtatgcaccccaaagactaatggggagagggagggccgggaagccaggaaagcttggtgttttctctgggtacaccccaagcagcgtctccttttggatacagttattgatgaggcttggccactggatgttttcactaactacactctacaagtgaactccttgcccaggccagttagaaaatcccttggggaactgtgatgaatattccatctttgattaaaaaagtgaaatagtctccataaaaaaaaaaaaaaaaaaaa

SEQ ID NO: 143 - DNA, 1670 bp, Human
attgagagtggctctaacaagtgccatttttccttgttagctttcatttctcagccctttacaagattaaaatagtctgcagtttaatctctccaaagctttacggacagtgattctgtcctaaacaagacagtgactccaggatttctgaagactattgtggaagaagcatccattaaggccaagctataacatcagaaatggtgaatgaatacaagaaaattcttttgctgaaaggatttgagctcatggatgattatcattttacatcaattaagtccttactggcctatgatttaggactaactacaaaaatgcaagaggaatacaacagaattaagattacagatttgatggaaaaaaagttccaaggcgttgcctgtctagacaaactaatagaacttgccaaagatatgccatcacttaaaaaccttgttaacaatcttcgaaaagagaagtcaaaagttgctaagaaaattaaaacacaagaaaaagctccagtgaaaaaaataaaccaggaagaagtgggtcttgcggcacctgcacccaccgcaagaaacaaactgacatcggaagcaagagggaggattcctgtagctcagaaaagaaaaactccaaacaaagaaaagactgaagccaaaaggaataaggtgtcccaagagcagagtaagcccccaggtccctcaggagccagcacatctgcagctgtggatcatcccccactaccccagacctcatcatcaactccatccaacacttcgtttactccgaatcaggaaacccaggcccaacggcaggtggatgcaagaagaaatgttccccaaaacgacccagtgacagtggtggtactgaaagcaacagcgccatttaaatacgagtccccagaaaatgggaaaagcacaatgtttcatgctacagtggccagtaagactcaatatttccatgtgaaagtcttcgacatcaacttgaaagagaaatttgtaaggaagaaggtcattaccatatctgattactctgaatgtaaaggagtaatggaaataaaggaagcatcatctgtgtctgactttaatcaaaattttgaggtcccaaacagaattatcgaaatagcaaataaaactcccaagatcagtcaactttacaagcaagcatctggaacaatggtgtatgggttgtttatgttacaaaagaaaagcgtacacaagaagaacacaatttatgaaatacaggataatacaggatccatggatgtagtggggagtggaaaatggcacaatatcaagtgtgagaaaggagataaacttcgactcttctgccttcaactgagaacagttgaccgcaagctgaaactggtgtgtggaagtcacagcttcatcaaggtcatcaaggccaagaaaaacaaggaaggaccaatgaatgttaattgaaatatgaaagctgaaatgcaacaaacaacttccgcttaaaacaattaagttgttaataactgtgattttgtaaatttcagtaattcatttaaatgatgtttcagtagatatattctagcatattaagagcttttataactgagttatagattagtttgctttctggaataaaattttcttcttatactcttccttttttttagatattacattttgcttttatgacattcacgaggcaaaaaaccg

SEQ ID NO: 144 - protein, 407 aa, Human
MVNEYKKILLLKGFELMDDYHFTSIKSLLAYDLGLTTKMQEEYNRIKITDLMEKKFQGVACLDKLIELAKDMPSLKNLVNNLRKEKSKVAKKIKTQEKAPVKKINQEEVGLAAPAPTARNKLTSEARGRIPVAQKRKTPNKEKTEAKRNKVSQEQSKPPGPSGASTSAAVDHPPLPQTSSSTPSNTSFTPNQETQAQRQVDARRNVPQNDPVTVVVLKATAPFKYESPENGKSTMFHATVASKTQYFHVKVFDINLKEKFVRKKVITISDYSECKGVMEIKEASSVSDFNQNFEVPNRIIEIANKTPKISQLYKQASGTMVYGLFMLQKKSVHKKNTIYEIQDNTGSMDVVGSGKWHNIKCEKGDKLRLFCLQLRTVDRKLKLVCGSHSFIKVIKAKKNKEGPMNVN

SEQ ID NO: 145 - DNA, 916 bp, Human
acttctcgctcgacacagccagagctggaggtgggtgcccggcacggaggggcctgcggaccaatggctctgccctgcaccttagggctcgggatgctgctggccctgccaggggccttgggctcgggtggcagcgcggaggacagcgtgggctccagctctgtcaccgttgtcctgctgctgctgctgctcctactgctggccactggcctagcactggcctggcgccgcctcagccgtgactcagggggctactaccacccggcccgcctaggtgccgcgctgtggggccgcacgcggcgcctgctctgggccagccccccaggtcgctggctgcaggcccgagctgagctggggtccacagacaatgaccttgagcgacaggaggatgagcaggacacagactatgaccacgtcgcggatggtggcctgcaggctgaccctggggaaggcgagcagcaatgtggagaggcgtccagcccagagcaggtccccgtgcgggctgaggaagccagagacagtgacacggagggcgacctggtcctcggctccccaggaccagcgagcgcagggggcagtgctgaggccctgctgagtgacctgcacgcctttgctggcagcgcagcctgggatgacagcgccagggcagctgggggccagggcctccatgtcaccgcactgtagaggccggtcttggtgtcccatccctgtcacagccgctcactccccgtgcctctgcttcccaagatgccatggctggactggacccccagcccacatgaccatgcctcagactgtcacccctaccagttcccaagtccatgtgtaccccgctcaccacgggaacggccccccccaaccacaggcatcaggcaaccatttgaaataaaactccttcagcctgtgaaaaaaaaaa

SEQ ID NO: 146 - protein, 206 aa, Human
MALPCTLGLGMLLALPGALGSGGSAEDSVGSSSVTVVLLLLLLLLLATGLALAWRRLSRDSGGYYHPARLGAALWGRTRRLLWASPPGRWLQARAELGSTDNDLERQEDEQDTDYDHVADGGLQADPGEGEQQCGEASSPEQVPVRAEEARDSDTEGDLVLGSPGPASAGGSAEALLSDLHAFAGSAAWDDSARAAGGQGLHVTAL

SEQ ID NO: 147 - DNA, 1339 bp, Human
ggccacccagtcatgggggacaccttcatccgtcacatcgccctgctgggctttgagaagcgcttcgtacccagccagcactatgtgtacatgttcctggtgaaatggcaggacctgtcggagaaggtggtctaccggcgcttcaccgagatctacgagttccataaaaccttaaaagaaatgttccctattgaggcaggggcgatcaatccagagaacaggatcatcccccacctcccagctcccaagtggtttgacgggcagcgggccgccgagaaccgccagggcacacttaccgagtactgcagcacgctcatgagcctgcccaccaagatctcccgctgtccccacctcctcgacttcttcaaggtgcgccctgatgacctcaagctccccacagacaaccagacaaaaaagccagagacatacttgatgcccaaagatggcaagagtaccgcgacagacatcaccggccccatcatcctgcagacgtaccgcgccattgccgactacgagaagacctcgggctccgagatggctctgtccacgggggacgtggtggaggtcgtggagaagagcgagagcggttggtggttctgtcagatgaaagcaaagcgaggctggatcccagcatccttcctcgagcccctggacagtcctgacgagacggaagaccctgagcccaactatgcaggtgagccatacgtcgccatcaaggcctacactgctgtggagggggacgaggtgtccctgctcgagggtgaagctgttgaggtcattcacaagctcctggacggctggtgggtcatcaggaaagacgacgtcacaggctactttccgtccatgtacctgcaaaagtcggggcaagacgtgtcccaggcccaacgccagatcaagcggggggcgccgccccgcaggtcgtccatccgcaacgcgcacagcatccatcagcggtcgcggaagcgcctcagccaggacgcctatcgccgcaacagcgtccgttttctgcagcagcgacgccgccaggcgcggccgggaccgcagagccccgggagcccgctcgaggaggagcggcagacgcagcgctctaaaccgcagccggcggtgcccccgcggccgagcgccgacctcatcctgaaccgctgcagcgagagcaccaagcggaagctggcgtctgccgtctgaggctggagcgcagtccccagctagcgtctcggcccttgccgccccgtgcctgtacatacgtgttctatagagcctggcgtctggacgccgagggcagccccgacccctgtccagcgcggctcccgccaccctcaataaatgttgcttggagtgg

SEQ ID NO: 148 - protein, 390 aa, Human [sequence omitted]

SEQ ID NO: 149 - DNA, 2403 bp, Human
tttgcaggtgcctcaggaaccctgaagctgggctgagccatgatgctgctgccagaacccctgcagagggcctggtttcaggagactcagagtcctctgtgaaaaagcccttggagagcgccccagcagggctgcacttggctcctgtgaggaaggggctcaggggtctgggcccctccgcctgggccgggctgggagccaggcgggcggctgggctgcagcaatggaccgtgagctggcccagcccgcgtccgtgctgagcctgcctgtcgtctgtggccatgcccatcatgggctcctcggtgtacatcacggtggagctggccattgctgtgctggccatcctgggcaatgtgctggtgtgctgggccgtgtggctcaacagcaacctgcagaacgtcaccaactactttgtggtgtcactggcggcggccgacatcgcagtgggtgtgctcgccatcccctttgccatcaccatcagcaccgggttctgcgctgcctgccacggctgcctcttcattgcctgcttcgtcctggtcctcacgcagagctccatcttcagtctcctggccatcgccattgaccgctacattgccatccgcatcccgctccggtacaatggcttggtgaccggcacgagggctaagggcatcattgccatctgctgggtgctgtcgtttgccatcggcctgactcccatgctaggttggaacaactgcggtcagccaaaggagggcaagaaccactcccagggctgcggggagggccaagtggcctgtctctttgaggatgtggtccccatgaactacatggtgtacttcaacttctttgcctgtgtgctggtgcccctgctgctcatgctgggtgtctatttgcggatcttcctggcggcgcgacgacagctgaagcagatggagagccagcctctgccgggggagcgggcacggtccacactgcagaaggaggtccatgctgccaagtcactggccatcattgtggggctctttgccctctgctggctgcccctacacatcatcaactgcttcactttcttctgccccgactgcagccacgcccctctctggctcatgtacctggccatcgtcctctcccacaccaattcggttgtgaatcccttcatctacgcctaccgtatccgcgagttccgccagaccttccgcaagatcattcgcagccacgtcctgaggcagcaagaacctttcaaggcagctggcaccagtgcccgggtcttggcagctcatggcagtgacggagagcaggtcagcctccgtctcaacggccacccgccaggagtgtgggccaacggcagtgctccccaccctgagcggaggcccaatggctatgccctggggctggtgagtggagggagtgcccaagagtcccaggggaacacgggcctcccagacgtggagctccttagccatgagctcaagggagtgtgcccagagccccctggcctagatgaccccctggcccaggatggagcaggagtgtcctgatgattcatggagtttgccccttcctaagggaaggagatctttatctttctggttggcttgaccagtcacgttgggagaagagagagagtgccaggagaccctgagggcagccggttcctactttggactgagagaagggagccccaggctggagcagcatgaggcccagcaagaagggcttgggttctgaggaagcagatgtttcatgctgtgaggccttgcaccaggtgggggccacagcaccagcagcatctttgctgggcaggcccagccctccactgcagaagcatctggaagcaccaccttgtctccacagagcagcttgggcacagcagactggcctggccctgagactggggagtggctccaatagcctcctgccacccacacaccactctccctagactctcctagggttcaggagctgctgggcccagaggtgacatttgacttttttccaggaaaaatgtaagtgtgaggaaaccctttttattttattacctttcactctctggctgctgggtctgccgtcggtcctgctgctaacctggcaccagagcctctgcccggggagcctcaggcagtcctctcctgctgtcacagctgccatccacttctcagtcccagggccatctcttggagtgacaaagctgggatcaaggatagggagttgtaacagagcagtgccagagcatgggcccaggtcccaggggagaggttggggctggcaggccactggcatgtgctgagtagcgcagagctacccagtgagaggccttgtctaactgcctttccttctaaagggaatgtttttttctgagataaaataaaaacgagccacatcgtgttttaagcttgtccaaatgaaaaaaaaaaaaaaaaa

SEQ ID NO: 150 - protein, 412 aa, Human
MPIMGSSVYITVELAIAVLAILGNVLVCWAVWLNSNLQNVTNYFVVSLAAADIAVGVLAIPFAITISTGFCAACHGCLFIACFVLVLTQSSIFSLLAIAIDRYIAIRIPLRYNGLVTGTRAKGIIAICWVLSFAIGLTPMLGWNNCGQPKEGKNHSQGCGEGQVACLFEDVVPMNYMVYFNFFACVLVPLLLMLGVYLRIFLAARRQLKQMESQPLPGERARSTLQKEVHAAKSLAIIVGLFALCWLPLHIINCFTFFCPDCSHAPLWLMYLAIVLSHTNSVVNPFIYAYRIREFRQTFRKIIRSHVLRQQEPFKAAGTSARVLAAHGSDGEQVSLRLNGHPPGVWANGSAPHPERRPNGYALGLVSGGSAQESQGNTGLPDVELLSHELKGVCPEPPGLDDPLAQDGAGVS

SEQ ID NO: 151 - DNA, 4119 bp, Human
ctggagagcctgctgcccgcccgcccgtaaaatggtcccctcggctggacagctcgccctgttcgctctgggtattgtgttggctgcgtgccaggccttggagaacagcacgtccccgctgagtgcagacccgcccgtggctgcagcagtggtgtcccattttaatgactgcccagattcccacactcagttctgcttccatggaacctgcaggtttttggtgcaggaggacaagccagcatgtgtctgccattctgggtacgttggtgcacgctgtgagcatgcggacctcctggccgtggtggctgccagccagaagaagcaggccatcaccgccttggtggtggtctccatcgtggccctggctgtccttatcatcacatgtgtgctgatacactgctgccaggtccgaaaacactgtgagtggtgccgggccctcatctgccggcacgagaagcccagcgccctcctgaagggaagaaccgcttgctgccactcagaaacagtggtctgaagagcccagaggaggagtttggccaggtggactgtggcagatcaataaagaaaggcttcttcaggacagcactgccagagatgcctgggtgtgccacagaccttcctacttggcctgtaatcacctgtgcagccttttgtgggccttcaaaactctgtcaagaactccgtctgcttggggttattcagtgtgacctagagaagaaatcagcggaccacgatttcaagacttgttaaaaaagaactgcaaagagacggactcctgttcacctaggtgaggtgtgtgcagcagttggtgtctgagtccacatgtgtgcagttgtcttctgccagccatggattccaggctatatatttctttttaatgggccacctccccacaacagaattctgcccaacacaggagatttctatagttattgttttctgtcatttgcctactggggaagaaagtgaaggaggggaaactgtttaatatcacatgaagaccctagctttaagagaagctgtatcctctaaccacgagactctcaaccagcccaacatcttccatggacacatgacattgaagaccatcccaagctatcgccacccttggagatgatgtcttatttattagatggataatggttttatttttaatctcttaagtcaatgtaaaaagtataaaaccccttcagacttctacattaatgatgtatgtgttgctgactgaaaagctatactgattagaaatgtctggcctcttcaagacagctaaggcttgggaaaagtcttccagggtgcggagatggaaccagaggctgggttactggtaggaataaaggtaggggttcagaaatggtgccattgaagccacaaagccggtaaatgcctcaatacgttctgggagaaaacttagcaaatccatcagcagggatctgtcccctctgttggggagagaggaagagtgtgtgtgtctacacaggataaacccaatacatattgtactgctcagtgattaaatgggttcacttcctcgtgagccctcggtaagtatgtttagaaatagaacattagccacgagccataggcatttcaggccaaatccatgaaagggggaccagtcatttattttccattttgttgcttggttggtttgttgctttatttttaaaaggagaagtttaactttgctatttattttcgagcactaggaaaactattccagtaatttttttttcctcatttccattcaggatgccggctttattaacaaaaactctaacaagtcacctccactatgtgggtcttcctttcccctcaagagaaggagcaattgttcccctgacatctgggtccatctgacccatggggcctgcctgtgagaaacagtgggtcccttcaaatacatagtggatagctcatccctaggaattttcattaaaatttggaaacagagtaatgaagaaataatatataaactccttatgtgaggaaatgctactaatatctgaaaagtgaaagatttctatgtattaactcttaagtgcacctagcttattacatcgtgaaaggtacatttaaaatatgttaaattggcttgaaattttcagagaattttgtcttcccctaattcttcttccttggtctggaagaacaatttctatgaattttctctttattttttttttataattcagacaattctatgacccgtgtcttcatttttggcactcttatttaacaatgccacacctgaagcacttggatctgttcagagctgaccccctagcaacgtagttgacacagctccaggtttttaaattactaaaataagttcaagtttacatcccttgggccagatatgtgggttgaggcttgactgtagcatcctgcttagagaccaatcaatggacactggtttttagacctctatcaatcagtagttagcatccaagagactttgcagaggcgtaggaatgaggctggacagatggcggaacgagaggttccctgcgaagacttgagatttagtgtctgtgaatgttctagttcctaggtccagcaagtcacacctgccagtgccctcatccttatgcctgtaacacacatgcagtgagaggcctcacatatacgcctccctagaagtgccttccaagtcagtcctttggaaaccagcaggtctgaaaaagaggctgcatcaatgcaagcctggttggaccattgtccatgcctcaggatagaacagcctggcttatttggggatttttcttctagaaatcaaatgactgataagcattggctccctctgccatttaatggcaatggtagtctttggttagctgcaaaaatactccatttcaagttaaaaatgcatcttctaatccatctctgcaagctccctgtgtttccttgccctttagaaaatgaattgttcactacaattagagaatcatttaacatcctgacctggtaagctgccacacacctggcagtggggagcatcgctgtttccaatggctcaggagacaatgaaaagcccccatttaaaaaaataacaaacattttttaaaaggcctccaatactcttatggagcctggatttttcccactgctctacaggctgtgactttttttaagcatcctgacaggaaatgttttcttctacatggaaagatagacagcagccaaccctgatctggaagacagggccccggctggacacacgtggaaccaagccagggatgggctggccattgtgtccccgcaggagagatgggcagaatggccctagagttcttttccctgagaaaggagaaaaagatgggattgccactcacccacccacactggtaagggaggagaatttgtgcttctggagcttctcaagggattgtgttttgcaggtacagaaaactgcctgttatcttcaagccaggttttcgagggcacatgggtcaccagttgctttttcagtcaatttggccgggatggactaatgaggctctaacactgctcaggagacccctgccctctagttggttctgggctttgatctcttccaacctgcccagtcacagaaggaggaatgactcaaatgcccaaaaccaagaacacattgcagaagtaagacaaacatgtatatttttaaatgttctaacataagacctgttctctctagccattgatttaccaggctttctgaaagatctagtggttcacacagagagagagagagtactgaaaaagcaactcctcttcttagtcttaataatttactaaaatggtcaacttttcattatctttattataataaacctgatgcttttttttagaactccttactctgatgtctgtatatgttgcactgaaaaggttaatatttaatgttttaatttattttgtgtggtaagttaattttgatttctgtaatgtgttaatgtgattagcagttattttccttaatatctgaattatacttaaagagtagtgagcaatataagacgcaattgtgtttttcagtaatgtgcattgttattgagttgtactgtaccttatttggaaggatgaaggaatgaacctttttttcctaaaaaaaaaaaaaaaaaaaaaaaaaaaaaaaaa

SEQ ID NO: 152 - protein, 160 aa, Human
MVPSAGQLALFALGIVLAACQALENSTSPLSADPPVAAAVVSHFNDCPDSHTQFCFHGTCRFLVQEDKPACVCHSGYVGARCEHADLLAVVAASQKKQAITALVVVSIVALAVLIITCVLIHCCQVRKHCEWCRALICRHEKPSALLKGRTACCHSETVV

SEQ ID NO: 153 - DNA, 3962 bp, Human
gaattccggcgtcgcggacgcatcccagtctgggcgggacgctcggccgcggcgaggcgggcaagcctggcagggcagagggagccccggctccgaggttgctcttcgcccccgaggatcagtcttggccccaaagcgcgacgcacaaatccacataacctgaggaccatggatgctgatgagggtcaagacatgtcccaagtttcagggaaggaaagcccccctgtaagcgatactccagatgagggcgatgagcccatgccgatccccgaggacctctccaccacctcgggaggacagcaaagctccaagagtgacagagtcgtggccagtaatgttaaagtagagactcagagtgatgaagagaatgggcgtgcctgtgaaatgaatggggaagaatgtgcggaggatttacgaatgcttgatgcctcgggagagaaaatgaatggctcccacagggaccaaggcagctcggctttgtcgggagttggaggcattcgacttcctaacggaaaactaaagtgtgatatctgtgggatcatttgcatcgggcccaatgtgctcatggttcacaaaagaagccacactggagaacggcccttccagtgcaatcagtgcggggcctcattcacccagaagggcaacctgctccggcacatcaagctgcattccggggagaagcccttcaaatgccacctctgcaactacgcctgccgccggagggacgccctcactggccacctgaggacgcactccgttggtaaacctcacaaatgtggatattgtggccgaagctataaacagcgaagctctttagaggaacataaagagcgctgccacaactacttggaaagcatgggccttccgggcacactgtacccagtcattaaagaagaaactaatcacagtgaaatggcagaagacctgtgcaagataggatcagagagatctctcgtgctggacagactagcaagtaacgtcgccaaacgtaagagctctatgcctcagaaatttcttggggacaagggcctgtccgacacgccctacgacagcagcgccagctacgagaaggagaacgaaatgatgaagtcccacgtgatggaccaagccatcaacaacgccatcaactacctgggggccgagtccctgcgcccgctggtgcagacgcccccgggcggttccgaggtggtcccggtcatcagcccgatgtaccagctgcacaagccgctcgcggagggcaccccgcgctccaaccactcggcccaggacagcgccgtggagaacctgctgctgctctccaaggccaagttggtgccctcggagcgcgaggcgtccccgagcaacagctgccaagactccacggacaccgagagcaacaacgaggagcagcgcagcggtctcatctacctgaccaaccacatcgccccgcacgcgcgcaacgggctgtcgctcaaggaggagcaccgcgcctacgacctgctgcgcgccgcctccgagaactcgcaggacgcgctccgcgtggtcagcaccagcggggagcagatgaaggtgtacaagtgcgaacactgccgggtgctcttcctggatcacgtcatgtacaccatccacatgggctgccacggcttccgtgatccttttgagtgcaacatgtgcggctaccacagccaggaccggtacgagttctcgtcgcacataacgcgaggggagcaccgcttccacatgagctaaagccctcccgcgcccccaccccagaccccgagccaccccaggaaaagcacaaggactgccgccttctcgctcccgccagcagcatagactggactggaccagacaatgttgtgtttggatttgtaactgttttttgttttttgtttgagttggttgattggggtttgatttgcttttgaaaagatttttatttttagaggcagggctgcattgggagcatccagaactgctaccttcctagatgtttccccagaccgctggctgagattccctcacctgtcgcttcctagaatccccttctccaaacgattagtctaaattttcagagagaaatagataaaacacgccacagcctgggaaggagcgtgctctaccctgtgctaagcacggggttcgcgcaccaggtgtctttttccagtccccagaagcagagagcacagcccctgctgtgtgggtctgcaggtgagcagacaggacaggtgtgccgccacccaagtgccaagacacagcagggccaacaacctgtgcccaggccagcttcgagctacatgcatctagggcggagaggctgcacttgtgagagaaaatactatttcaagtcatattctgcgtaggaaaatgaattggttggggaaagtcgtgtctgtcagactgccctgggtggagggagacgccgggctagagcctttgggatcgtcctggattcactggctttgcggaggctgctcagatggcctgagcctcccgaggcttgctgccccgtaggaggagactgtcttcccgtgggcatatctggggagccctgttccccgctttttcactcccatacctttaatggcccccaaaatctgtcactacaatttaaacaccagtcccgaaatttggatcttctttctttttgaatctctcaaacggcaacattcctcagaaaccaaagctttatttcaaatctcttccttccctggctggttccatctagtaccagaggcctcttttcctgaagaaatccaatcctagccctcattttaattatgtacatctgtttgtagccacaagcctgaatttctcagtgttggtaagtttctttacctaccctcactatatattattctcgttttaaaacccataaaggagtgatttagaacagtcattaattttcaactcaatgaaatatgtgaagcccagcatctctgttgctaacacacagagctcacctgtttgaaaccaagctttcaaacatgttgaagctctttactgtaaaggcaagccagcatgtgtgtccacacatacataggatggctggctctgcacctgtaggatattggaatgcacagggcaattgagggactgagccagaccttcggagagtaatgccaccagatcccctaggaaagaggaggcaaatggcactgcaggtgagaaccccgcccatccgtgctatgacatggaggcactgaagcccgaggaaggtgtgtggagattctaatcccaacaagcaagggtctccttcaagattaatgctatcaatcattaaggtcattactctcaaccacctaggcaatgaagaatataccatttcaaatatttacagtacttgtcttcaccaacactgtcccaaggtgaaatgaagcaacagagaggaaattgtacataagtacctcagcatttaatccaaacaggggttcttagtctcagcactatgacattttgggctgactacttatttgttaggcgggagctctcctgtgcattgtaggataattagcagtatccctggtggctacccaatagacgccagtagcaccccgaattgacaacccaaactctccagacatcaccaactgtcccctgcgaggagaaatcactcctgggggagaaccactgacccaaatgaattctaaaccaatcaaatgtctgggaagccctccaagaaaaaaaatagaaaagcacttgaagaatattcccaatattcccggtcagcagtatcaaggctgacttgtgttcatgtggagtcattataaattctataaatcaattattccccttcggtcttaaaaatatatttcctcataaacatttgagttttgttgaaaagatggagtttacaaagataccattcttgagtcatggatttctctgctcacagaagggtgtggcatttggaaacgggaataaacaaaattgctgcaccaatgcactgagtgaaggaagagagacagaggatcaagggcttt

SEQ ID NO: 154 - protein, 519 aa, Human
MDADEGQDMSQVSGKESPPVSDTPDEGDEPMPIPEDLSTTSGGQQSSKSDRVVASNVKVETQSDEENGRACEMNGEECAEDLRMLDASGEKMNGSHRDQGSSALSGVGGIRLPNGKLKCDICGIICIGPNVLMVHKRSHTGERPFQCNQCGASFTQKGNLLRHIKLHSGEKPFKCHLCNYACRRRDALTGHLRTHSVGKPHKCGYCGRSYKQRSSLEEHKERCHNYLESMGLPGTLYPVIKEETNHSEMAEDLCKIGSERSLVLDRLASNVAKRKSSMPQKFLGDKGLSDTPYDSSASYEKENEMMKSHVMDQAINNAINYLGAESLRPLVQTPPGGSEVVPVISPMYQLHKPLAEGTPRSNHSAQDSAVENLLLLSKAKLVPSEREASPSNSCQDSTDTESNNEEQRSGLIYLTNHIAPHARNGLSLKEEHRAYDLLRAASENSQDALRVVSTSGEQMKVYKCEHCRVLFLDHVMYTIHMGCHGFRDPFECNMCGYHSQDRYEFSSHITRGEHRFHMS

SEQ ID NO: 155 - DNA, 1107 bp, Human
tgctgcaactcaaactaaccaacccactgggagaagatgcctgggggtccaggagtcctccaagctctgcctgccaccatcttcctcctcttcctgctgtctgctgtctacctgggccctgggtgccaggccctgtggatgcacaaggtcccagcatcattgatggtgagcctgggggaagacgcccacttccaatgcccgcacaatagcagcaacaacgccaacgtcacctggtggcgcgtcctccatggcaactacacgtggccccctgagttcttgggcccgggcgaggaccccaatggtacgctgatcatccagaatgtgaacaagagccatgggggcatatacgtgtgccgggtccaggagggcaacgagtcataccagcagtcctgcggcacctacctccgcgtgcgccagccgccccccaggcccttcctggacatgggggagggcaccaagaaccgaatcatcacagccgaggggatcatcctcctgttctgcgcggtggtgcctgggacgctgctgctgttcaggaaacgatggcagaacgagaagctcgggttggatgccggggatgaatatgaagatgaaaacctttatgaaggcctgaacctggacgactgctccatgtatgaggacatctcccggggcctccagggcacctaccaggatgtgggcagcctcaacataggagatgtccagctggagaagccgtgacacccctactcctgccaggctgcccccgcctgctgtgcacccagctccagtgtctcagctcacttccctgggacattctcctttcagcccttctgggggcttccttagtcatattcccccagtggggggtgggagggtaacctcactcttctccaggccaggcctccttggactcccctgggggtgtcccactcttcttccctctaaactgccccacctcctaacctaatccccacgccccgctgcctttcccaggctcccctcacccagcgggtaatgagcccttaatcgctgcctctaggggagctgattgtagcagcctcgttagtgtcaccccctcctccctgatctgtcagggccacttagtgataataaattcttcccaactgc

SEQ ID NO: 156 - protein, 226 aa, Human
MPGGPGVLQALPATIFLLFLLSAVYLGPGCQALWMHKVPASLMVSLGEDAHFQCPHNSSNNANVTWWRVLHGNYTWPPEFLGPGEDPNGTLIIQNVNKSHGGIYVCRVQEGNESYQQSCGTYLRVRQPPPRPFLDMGEGTKNRIITAEGIILLFCAVVPGTLLLFRKRWQNEKLGLDAGDEYEDENLYEGLNLDDCSMYEDISRGLQGTYQDVGSLNIGDVQLEKP

SEQ ID NO: 157 - DNA, 2183 bp, Human
atggcgacctccacgggtcgctggcttctcctccggcttgcactattcggcttcctctgggaagcgtccggcggcctcgactcgggggcctcccgcgacgacgacttgctactgccctatccacgcgcgcgcgcgcgcctcccccgggactgcacacgggtgcgcgccggcaaccgcgagcacgagagttggcctccgcctcccgcgactcccggcgccggcggtctggccgtgcgcaccttcgtgtcgcacttcagggaccgcgcggtggccggccacctgacgcgggccgttgagcccctgcgcaccttctcggtgctggagcccggtggacccggcggctgcgcggcgagacgacgcgccaccgtggaggagacggcgcgggcggccgactgccgtgtcgcccagaacggcggcttcttccgcatgaactcgggcgagtgcctggggaacgtggtgagcgacgagcggcgggtgagcagctccggggggctgcagaacgcgcagttcgggatccgccgcgacgggaccctggtcaccgggtacctgtctgaggaggaggtgctggacactgagaacccatttgtgcagctgctgagtggggtcgtgtggctgattcgtaatggaagcatctacatcaacgagagccaagccacagagtgtgacgagacacaggagacaggttcctttagcaaatttgtgaatgtgatatcagccaggacggccattggccacgaccggaaagggcagctggtgctctttcatgcagacggccatacggagcagcgtggcatcaacctgtgggaaatggcggagttcctgctgaaacaggacgtggtcaacgccatcaacctggatgggggtggctctgccacctttgtgctcaacgggaccttggccagttacccgtcagatcactgccaggacaacatgtggcgctgtccccgccaagtgtccaccgtggtgtgtgtgcacgaaccccgctgccagccgcctgactgccacggccacgggacctgcgtggacgggcactgccaatgcaccgggcacttctggcggggtcccggctgtgatgagctggactgtggcccctctaactgcagccagcacggactgtgcacggagaccggctgccgctgtgatgccggatggaccgggtccaactgcagtgaagagtgtccccttggctggcatgggccgggctgccagaggcgttgtaagtgtgagcaccattgtccctgtgaccccaagactggcaactgcagcgtctccagagtaaagcagtgtctccagccacctgaagccaccctgagggcgggagaactctcctttttcaccaggaccgcctggctagccctcaccctggcgctggccttcctcctgctgatcagcattgcagcaaacctgtccttgctcctgtccagagcagagaggaaccggcgcctgcatggggactatgcataccacccgctgcaggagatgaacggggagcctctggccgcagagaaggagcagccagggggcgcccacaaccccttcaaggactgaagcctcaagctgcccggggtggcacgtcgcgaaagcttgtttccccacggtctggcttctgcaggggaaatttcaaggccactggcgtggaccatctgggtgtcctcaatggcccctgtggggcagccaagttcctgatagcacttgtgcctcagcccctcacctggccacctgccagggcacctgcaaccctagcaataccatgctcgctggagaggctcagctgcctgcttctcgcctgcctgtgtctgctgccgagaagcccgtgcccccgggagggctgccgcactgccaaagagtctccctcctcctggggaaggggctgccaacgaaccagactcagtgaccacgtcatgacagaacagcacatcctggccagcacccctggctggagtgggttaaagggacgagtctgccttcctggctgtgacacgggaccccttttctacagacctcatcactggatttgccaactagaattcgatttcctgtcataggaagctccttggaagaagggatggggggatgaaatcatgtttacagacctgttttgtcatcctgctgccaagaagttttttaatcacttgaataaattgatataataaaaggagccaccaggtggtgtgtggattctg

SEQ ID NO: 158 - protein, 515 aa, Human
MATSTGRWLLLRLALFGFLWEASGGLDSGASRDDDLLLPYPRARARLPRDCTRVRAGNREHESWPPPPATPGAGGLAVRTFVSHFRDRAVAGHLTRAVEPLRTFSVLEPGGPGGCAARRRATVEETARAADCRVAQNGGFFRMNSGECLGNVVSDERRVSSSGGLQNAQFGIRRDGTLVTGYLSEEEVLDTENPFVQLLSGVVWLIRNGSIYINESQATECDETQETGSFSKFVNVISARTAIGHDRKGQLVLFHADGHTEQRGINLWEMAEFLLKQDVVNAINLDGGGSATFVLNGTLASYPSDHCQDNMWRCPRQVSTVVCVHEPRCQPPDCHGHGTCVDGHCQCTGHFWRGPGCDELDCGPSNCSQHGLCTETGCRCDAGWTGSNCSEECPLGWHGPGCQRRCKCEHHCPCDPKTGNCSVSRVKQCLQPPEATLRAGELSFFTRTAWLALTLALAFLLLISIAANLSLLLSRAERNRRLHGDYAYHPLQEMNGEPLAAEKEQPGGAHNPFKD

SEQ ID NO: 159 - DNA, 4101 bp, Human
ggctcctcgcgatcttgttcctttcccctccgcttctctgacctagctgcgcggccccggcccgggagctgccgaacccgcgcctcccctgggtgaggaggacacgcctgccctcgtcgagaaaacttttcctgccgactcagttggggcggcggtggcaggaagtgcgggcagcgacctctcctccgcctgccccgcgcgccctgccggaggtcggcgctgagcttgcgatcaagtttgtgggggccccccttcccagttgccggcgagtctcgcctcgagaggggcgcccgaccccggggagggcggcaggccagggcgaaggccaagggcgttttgtggcgccggagactaggtgcggagcaaggcggggactcgcacccgcatccgagagcgcggaggtcgcgcagcccgggagaagggagcctccggcggctgcttcctagagtccacagtgcgctgtctcctttggctgaggagagtgtcctggccccgagtctatcgaggaaaatgaagttaagccgccagttcaccgtgttcggcagtgcgatcttctgtgtggtgattttctcgctctacctgatgctggaccggggtcacttagactaccccaggaacccgcgccgcgagggctccttccctcagggccagctctcaatgttgcaagaaaaaatagaccatttggagcgtttgctagctgagaataatgagatcatctcaaatattagagactcagtcatcaatttgagtgagtctgtggaggatggtccgaaaagttcacaaagcaatttcagccaaggtgctggctcacatcttctgccctcacaattatccctctcagttgacactgcagactgtctgtttgcttcacaaagtggaagtcacaattcagatgtgcagatgttggatgtttacagtctaatttcttttgacaatccagatggtggagtttggaagcaaggatttgacattacttatgaatctaatgaatgggacactgaaccccttcaagtctttgtggtgcctcattcccataacgacccaggttggttgaagactttcaatgactactttagagacaagactcagtatatttttaataacatggtcctaaagctgaaagaagactcacggaggaagtttatttggtctgagatctcttacctttcaaagtggtgggatattatagatattcagaagaaggatgctgttaaaagtttaatagaaaatggtcagcttgaaattgtgacaggtggctgggttatgcctgatgaagctactccacattattttgccttaattgatcaactaattgaaggacatcagtggctggaaaataatataggagtgaaacctcggtccggctgggctattgatccctttggacactcaccaacaatggcttatcttctaaaccgtgctggactttctcacatgcttatccagagagttcattatgcagttaaaaaacactttgcactgcataaaacattggagtttttttggagacagaattgggatctgggatctgtcacagatattttatgccacatgatgcccttctacagctatgacatccctcacacttgtggacctgatcctaaaatatgctgccagtttgattttaaacgtcttcctggaggcagatttggttgtccctggggagtccccccagaaacaatacatcctggaaatgtccaaagcagggctcggatgctactagatcagtaccgaaagaagtcaaagctttttcgtaccaaagttctcctggctccactaggagatgatttccgctactgtgaatacacggaatgggatttacagtttaagaattatcagcagctttttgattatatgaattctcagtccaagtttaaagttaagatacagtttggaactttatcagatttttttgatgcgctggataaagcagatgaaactcagagagacaagggccagtcgatgttccctgttttaagtggagattttttcacttatgccgatcgagatgatcattactggagtggctattttacatccagacccttttacaaacgaatggacagaatcatggaatctcatttaagggctgctgaaattctttactatttcgccctgagacaagctcacaaatacaagataaataaatttctctcatcatcactttacacggcactgacagaagccagaaggaatttgggactgtttcaacatcatgatgctatcacaggaactgcaaaagactgggtggttgtggattatggtaccagactttttcattcgttaatggttttggagaagataattggaaattctgcatttcttcttattttgaaggacaaactcacatacgactcttactctcctgataccttcctggagatggatttgaaacaaaaatcacaagattctctgccacaaaaaaatataataaggctgagtgcggagccaaggtaccttgtggtctataatcctttagaacaagaccgaatctcgttggtctcagtctatgtgagttccccgacagtgcaagtgttctctgcttcaggaaaacctgtggaagttcaagtcagcgcagtttgggatacagcaaatactatttcagaaacagcctatgagatctcttttcgagcacatataccgccattgggactgaaagtgtataagattttggaatcagcaagttcaaattcacatttagctgattatgtcttgtataagaataaagtagaagatagcggaattttcaccataaagaatatgataaatactgaagaaggtataacactagagaactcctttgttttacttcggtttgatcaaactggacttatgaagcaaatgatgactaaagaagatggtaaacaccatgaagtaaatgtgcaattttcatggtatggaaccacaattaaaagagacaaaagtggtgcctacctcttcttacctgatggtaatgccaagccttatgtttacacaacaccgccctttgtcagagtgacacatggaaggatttattcggaagtgacttgcttttttgaccatgttactcatagagtccgactataccacatacagggaatagaaggacagtctgtggaagtttccaatattgtggacatccgaaaagtatataaccgtgagattgcaatgaaaatttcttctgatataaaaagccaaaatagattttatactgacctaaatgggtaccagattcaacctagaatgacactgagcaaattgcctcttcaagcaaatgtctatcccatgaccacaatggcctatatccaggatgccaaacatcgtttgacactgctctctgctcagtctttaggggtttcgagtttgaatagtggtcagattgaagttatcatggatcgaagactcatgcaagatgataatcgtggccttgagcaaggtatccaggataacaagattacagctaatctatttcgaatactactagaaaaaagaagtgctgttaatacggaagaagaaaagaagtcggtcagttatccttctctccttagccacataacttcttctctcatgaatcatccagtcattccaatggcaaataagttctcacctacccttgagctgcaaggtgaattctctccattacagtcatctttgccttgtgacattcatctggttaatttgagaacaatacagtcaaaggtgggcaatgggcactccaatgaggcagccttgatcctccacagaaaagggtttgattgtcggttctctagcaaaggcacagggctgttttgttctactactcagggaaagatattggtacagaaacttttaaacaagtttattgtcgaaagtctcacaccttcatcactatccttgatgcattcacctcccggcactcagaatataagtgagatcaacttgagtccaatggaaatcagcacattccgaatccagttgaggtgaacctgactttcacatttggattgagaatcattggcttttatacctttcttggtttgacgtgcaataaagaagcacattattttagcttctggctactgtgagaacatgaattctgtgattctgtgggttttttcttttttcttttaccagtacagtaag

SEQ ID NO: 160 - protein, 1143 aa, Human
MKLSRQFTVFGSAIFCVVIFSLYLMLDRGHLDYPRNPRREGSFPQGQLSMLQEKIDHLERLLAENNEIISNIRDSVINLSESVEDGPKSSQSNFSQGAGSHLLPSQLSLSVDTADCLFASQSGSHNSDVQMLDVYSLISFDNPDGGVWKQGFDITYESNEWDTEPLQVFVVPHSHNDPGWLKTFNDYFRDKTQYIFNNMVLKLKEDSRRKFIWSEISYLSKWWDIIDIQKKDAVKSLIENGQLEIVTGGWVMPDEATPHYFALIDQLIEGHQWLENNIGVKPRSGWAIDPFGHSPTMAYLLNRAGLSHMLIQRVHYAVKKHFALHKTLEFFWRQNWDLGSVTDILCHMMPFYSYDIPHTCGPDPKICCQFDFKRLPGGRFGCPWGVPPETIHPGNVQSRARMLLDQYRKKSKLFRTKVLLAPLGDDFRYCEYTEWDLQFKNYQQLFDYMNSQSKFKVKIQFGTLSDFFDALDKADETQRDKGQSMFPVLSGDFFTYADRDDHYWSGYFTSRPFYKRMDRIMESHLRAAEILYYFALRQAHKYKINKFLSSSLYTALTEARRNLGLFQHHDAITGTAKDWVVVDYGTRLFHSLMVLEKIIGNSAFLLILKDKLTYDSYSPDTFLEMDLKQKSQDSLPQKNIIRLSAEPRYLVVYNPLEQDRISLVSVYVSSPTVQVFSASGKPVEVQVSAVWDTANTISETAYEISFRAHIPPLGLKVYKILESASSNSHLADYVLYKNKVEDSGIFTIKNMINTEEGITLENSFVLLRFDQTGLMKQMMTKEDGKHHEVNVQFSWYGTTIKRDKSGAYLFLPDGNAKPYVYTTPPFVRVTHGRIYSEVTCFFDHVTHRVRLYHIQGIEGQSVEVSNIVDIRKVYNREIAMKISSDIKSQNRFYTDLNGYQIQPRMTLSKLPLQANVYPMTTMAYIQDAKHRLTLLSAQSLGVSSLNSGQIEVIMDRRLMQDDNRGLEQGIQDNKITANLFRILLEKRSAVNTEEEKKSVSYPSLLSHITSSLMNHPVIPMANKFSPTLELQGEFSPLQSSLPCDIHLVNLRTIQSKVGNGHSNEAALILHRKGFDCRFSSKGTGLFCSTTQGKILVQKLLNKFIVESLTPSSLSLMHSPPGTQNISEINLSPMEISTFRIQLR

SEQ ID NO: 161 - DNA, 1334 bp, Human
aatcattagagcctgagtcactctccccaggagacccagacctagaactacccagagcaagaccacagctggtgaacagtccaggagcagacaagatggagacaaattcctctctccccacgaacatctctggagggacacctgctgtatctgctggctatctcttcctggatatcatcacttatctggtatttgcagtcacctttgtcctcggggtcctgggcaacgggcttgtgatctgggtggctggattccggatgacacacacagtcaccaccatcagttacctgaacctggccgtggctgacttctgtttcacctccactttgccattcttcatggtcaggaaggccatgggaggacattggcctttcggctggttcctgtgcaaattcgtctttaccatagtggacatcaacttgttcggaagtgtcttcctgatcgccctcattgctctggaccgctgtgtttgcgtcctgcatccagtctggacccagaaccaccgcaccgtgagcctggccaagaaggtgatcattgggccctgggtgatggctctgctcctcacattgccagttatcattcgtgtgactacagtacctggtaaaacggggacagtagcctgcacttttaacttttcgccctggaccaacgaccctaaagagaggataaatgtggccgttgccatgttgacggtgagaggcatcatccggttcatcattggcttcagcgcacccatgtccatcgttgctgtcagttatgggcttattgccaccaagatccacaagcaaggcttgattaagtccagtcgtcccttacgggtcctctcctttgtcgcagcagccttttttctctgctggtccccatatcaggtggtggcccttatagccacagtcagaatccgtgagttattgcaaggcatgtacaaagaaattggtattgcagtggatgtgacaagtgccctggccttcttcaacagctgcctcaaccccatgctctatgtcttcatgggccaggacttccgggagaggctgatccacgcccttcccgccagtctggagagggccctgaccgaggactcaacccaaaccagtgacacagctaccaattctactttaccttctgcagaggtggagttacaggcaaagtgaggagggagctgggggacactttcgagctcccagctccagcttcgtctcaccttgagttaggctgagccacaggcatttcctgcttattttaggattacccactcatcagaaaaaaaaaaaaaagcctttgtgtcccctgatttggggagaataaacagatatgagtttaaaaaaaaaaaaaaaaaa

SEQ ID NO: 162 - DNA, 1573 bp, Human
ggctgggagagatggcaggcggaagacaccggcgcgtcgtgggcaccctccacctgctgctgctggtggccgccctgccctgggcatccaggggggtcagtccgagtgcctcagcctggccagaggagaagaattaccaccagccagccattttgaattcatcggctcttcggcaaattgcagaaggcaccagtatctctgaaatgtggcaaaatgacttacagccattgctgatagagcgatacccgggatcccctggaagctatgctgctcgtcagcacatcatgcagcgaattcagaggcttcaggctgactgggtcttggaaatagacaccttcttgagtcagacaccctatgggtaccggtctttctcaaatatcatcagcaccctcaatcccactgctaaacgacatttggtcctcgcctgccactatgactccaagtatttttcccactggaacaacagagtgtttgtaggagccactgattcagccgtgccatgtgcaatgatgttggaacttgctcgtgccttagacaagaaactcctttccttaaagactgtttcagactccaagccagatttgtcactccagctgatcttctttgatggtgaagaggcttttcttcactggtctcctcaagattctctctatgggtctcgacacttagctgcaaagatggcatcgaccccgcacccacctggagcgagaggcaccagccaactgcatggcatggatttattggtcttattggatttgattggagctccaaacccaacgtttcccaatttttttccaaactcagccaggtggttcgaaagacttcaagcaattgaacatgaacttcatgaattgggtttgctcaaggatcactctttggaggggcggtatttccagaattacagttatggaggtgtgattcaggatgaccatattccatttttaagaagaggtgttccagttctgcatctgataccgtctcctttccctgaagtctggcacaccatggatgacaatgaagaaaatttggatgaatcaaccattgacaatctaaacaaaatcctacaagtctttgtgttggaatatcttcatttgtaatactctgatttagtttaggataattggttctagaattgaattcaaaagtcaaggcatcatttaaaataatctgatttcagacaaatgctgtgtggaaacatctatcctatagatcatcctattcttatgtgtctttggttatcagatcaattacagaataattgtgttgtgatattgtgtcctaaattgctcattaatttttatttacagattgaaaaagaggcaccgtgtaaagaaaatggcaaaataaatatctttccaaggatcatcatcacgatagctaaacagtacttaaatagcggttggaactaggtagcctttcgaattttatgattttttcatatgtggaaatctattacatgtaatacaaaacaaacatgtagtttgaaggcggtcagatttctttgagaaatctttgtagagttaattttatggaaattaaaatcagaattaaatgctaaaaaaaaaaaaaaaaa

SEQ ID NO: 163 - protein, 361 aa, Human
MAGGRHRRVVGTLHLLLLVAALPWASRGVSPSASAWPEEKNYHQPAILNSSALRQIAEGTSISEMWQNDLQPLLIERYPGSPGSYAARQHIMQRIQRLQADWVLEIDTFLSQTPYGYRSFSNIISTLNPTAKRHLVLACHYDSKYFSHWNNRVFVGATDSAVPCAMMLELARALDKKLLSLKTVSDSKPDLSLQLIFFDGEEAFLHWSPQDSLYGSRHLAAKMASTPHPPGARGTSQLHGMDLLVLLDLIGAPNPTFPNFFPNSARWFERLQAIEHELHELGLLKDHSLEGRYFQNYSYGGVIQDDHIPFLRRGVPVLHLIPSPFPEVWHTMDDNEENLDESTIDNLNKILQVFVLEYLHL

SEQ ID NO: 164 - DNA, 2287 bp, Human
cgcgccccgcgcagccccgggcgccgcgcgtcctgcccggcctgcggccccagcccttgcgccgctcgtccgacccgcgatcgtccaccagaccgtgcctcccggccgcccggccggcccgcgtgcatgcttcggtctgggccagcctctgggccgtccgtccccactggccgggccatgccgagtcgccgcgtcgccagaccgccggctgcgccggagctgggggccttagggtcccccgacctctcctcactctcgctcgccgtttccaggagcacagatgaattggagatcatcgacgagtacatcaaggagaacggcttcggcctggacgggggacagccgggcccgggcgaggggctgccacgcctggtgtctcgcggggctgcgtccctgagcacggtcaccctgggccctgtggcgcccccagccacgccgccgccttggggctgccccctgggccgactagtgtccccagcgccgggcccgggcccgcagccgcacctggtcatcacggagcagcccaagcagcgcggcatgcgcttccgctacgagtgcgagggccgctcggccggcagcatccttggggagagcagcaccgaggccagcaagacgctgcccgccatcgagctccgggattgtggagggctgcgggaggtggaggtgactgcctgcctggtgtggaaggactggcctcaccgagtccacccccacagcctcgtggggaaagactgcaccgacggcatctgcagggtgcggctccggcctcacgtcagcccccggcacagttttaacaacctgggcatccagtgtgtgaggaagaaggagattgaggctgccattgagcggaagattcaactgggcattgacccctacaacgctgggtccctgaagaaccatcaggaagtagacatgaatgtggtgaggatctgcttccaggcctcatatcgggaccagcagggacagatgcgccggatggatcctgtgctttccgagcccgtctatgacaagaaatccacaaacacatcagagctgcggatttgccgaattaacaaggaaagcgggccgtgcaccggtggcgaggagctctacttgctctgcgacaaggtgcagaaagaggacatatcagtggtgttcagcagggcctcctgggaaggtcgggctgacttctcccaggccgacgtgcaccgccagattgccattgtgttcaagacgccgccctacgaggacctggagattgtcgagcccgtgacagtcaacgtcttcctgcagcggctcaccgatggggtctgcagcgagccattgcctttcacgtacctgcctcgcgaccatgacagctacggcgtggacaagaagcggaaacgggggatgcccgacgtccttggggagctgaacagctctgacccccatggcatcgagagcaaacggcggaagaaaaagccggccatcctggaccacttcctgcccaaccacggctcaggcccgttcctcccgccgtcagccctgctgccagaccctgacttcttctctggcaccgtgtccctgcccggcctggagccccctggcgggcctgacctcctggacgatggctttgcctacgaccctacggcccccacactcttcaccatgctggacctgctgcccccggcaccgccacacgctagcgctgttgtgtgcagcggaggtgccggggccgtggttggggagacccccggccctgaaccactgacactggactcgtaccaggccccgggccccggggatggaggcaccgccagccttgtgggcagcaacatgttccccaatcattaccgcgaggcggcctttgggggcggcctcctatccccggggcctgaagccacgtagccccgcgatgccagaggaggggcactgggtggggagggaggtggaggagccgtgcaatcccaaccaggatgtctagcacccccatccccttggcccttcctcatgcttctgaagtggacatattcagccttggcgagaagctccgttgcacgggtttccccttgagcccattttacagatgaggaaactgagtccggagaggaaaagggacatggctcccgtgcactagcttgttacagctgcctctgtccccacatgtgggggcaccttctccagtaggattcggaaaagattgtacatatgggaggagggggcagattcctggccctccctccccagacttgaaggtggggggtaggttggttgttcagagtcttcccaataaagatgagtttttgagcctcaaaaaaaaaaaaaaaaa

SEQ ID NO: 165 - DNA, 2051 bp, Human
cgccactttgctggagcattcactaggcgaggcgctccatcggactcactagccgcactcatgaatcggcaccatctgcaggatcactttctggaaatagacaagaagaactgctgtgtgttccgagatgacttcattgccaaggtgttgccgccggtgttggggctggagtttatctttgggcttctgggcaatggccttgccctgtggattttctgtttccacctcaagtcctggaaatccagccggattttcctgttcaacctggcagtagctgactttctactgatcatctgcctgccgttcgtgatggactactatgtgcggcgttcagactggaactttggggacatcccttgccggctggtgctcttcatgtttgccatgaaccgccagggcagcatcatcttcctcacggtggtggcggtagacaggtatttccgggtggtccatccccaccacgccctgaacaagatctccaattggacagcagccatcatctcttgccttctgtggggcatcactgttggcctaacagtccacctcctgaagaagaagttgctgatccagaatggccctgcaaatgtgtgcatcagcttcagcatctgccataccttccggtggcacgaagctatgttcctcctggagttcctcctgcccctgggcatcatcctgttctgctcagccagaattatctggagcctgcggcagagacaaatggaccggcatgccaagatcaagagagccatcaccttcatcatggtggtggccatcgtctttgtcatctgcttccttcccagcgtggttgtgcggatccgcatcttctggctcctgcacacttcgggcacgcagaattgtgaagtgtaccgctcggtggacctggcgttctttatcactctcagcttcacctacatgaacagcatgctggaccccgtggtgtactacttctccagcccatcctttcccaacttcttctccactttgatcaaccgctgcctccagaggaagatgacaggtgagccagataataaccgcagcacgagcgtcgagctcacaggggaccccaacaaaaccagaggcgctccagaggcgttaatggccaactccggtgagccatggagcccctcttatctgggcccaacctcaaataaccattccaagaagggacattgtcaccaagaaccagcatctctggagaaacagttgggctgttgcatcgagtaatgtcactggactcggcctaaggtttcctggaacttccagattcagagaatctgatttagggaaactgtggcagatgagtgggagactggttgcaaggtgtgaccacaggaatcctggaggaacagagagtaaagcttctaggcatctgaaacttgcttcatctctgacgctcgcaggactgaagatgggcaaattgtaggcgtttctgctgagcagagttggagccagagatctacttgtgacttgttggccttcttcccacatctgcctcagactggggggggctcagctcctcgggtgatatctagcctgcttgtgagctctagcagggataaggagagctgagattggagggaattgtgttgctcctggaggaagcccaggcatcattaaacaagccagtaggtcacctggcttccgtggaccaattcatctttcagacaagctttagagaaatggactcagggaagagactcacatgctttggttagtatctgtgtttccggtgggtgtaataggggattagccccagaagggactgagctaaacagtgttattatgggaaaggaaatggcattgctgctttcaaccagcgactaatgcaatccattcctctcttgtttatagtaatctaagggttgagcagttaaaacggcttcaggatagaaagctgtttcccacctgtttcgttttaccattaaaagggaaacgtgcctctgccccacgggtagagggggtgcacgttcctcctggttccttcgcttgtgtttctgtacttaccaaaaatctaccacttcaataaattttgataggagacaaaaaaaaaa

SEQ ID NO: 166 - protein, 387 aa, Human
MNRHHLQDHFLEIDKKNCCVFRDDFIAKVLPPVLGLEFIFGLLGNGLALWIFCFHLKSWKSSRIFLFNLAVADFLLIICLPFVMDYYVRRSDWNFGDIPCRLVLFMFAMNRQGSIIFLTVVAVDRYFRVVHPHHALNKISNWTAAIISCLLWGITVGLTVHLLKKKLLIQNGPANVCISFSICHTFRWHEAMFLLEFLLPLGIILFCSARIIWSLRQRQMDRHAKIKRAITFIMVVAIVFVICFLPSVVVRIRIFWLLHTSGTQNCEVYRSVDLAFFITLSFTYMNSMLDPVVYYFSSPSFPNFFSTLINRCLQRKMTGEPDNNRSTSVELTGDPNKTRGAPEALMANSGEPWSPSYLGPTSNNHSKKGHCHQEPASLEKQLGCCIE

SEQ ID NO: 167 - DNA, 3283 bp, Human
cccgccagctcgcggagccgctctgccccgcgccctagcccgcgcctgcagcccgcccaggcggagtcagcccgcgctccgcccgccgcgatccgagctcggaggttcggactccgggctcgccgccccccgggccggctccgcgccccgcactcccggcgcccagcgccccgcgccccggcgggcggagcgcaccatgccgcagctggactccggcgggggcggcgcgggcggcggcgacgacctcggcgcgccggacgagctgctggccttccaggatgaaggcgaggagcaggacgacaagagccgcgacagcgccgccggtcccgagcgcgacctggccgagctcaagtcgtcgctcgtgaacgagtccgagggcgcggccggcggcgcagggatcccgggggtcccgggggccggcgccggggcccgcggcgaggccgaggctctcgggcgggaacacgctgcgcagagactcttcccggacaaacttccagagcccctggaggacggcctgaaggccccggagtgcaccagcggcatgtacaaagagaccgtctactccgccttcaatctgctcatgcattacccacccccctcgggagcagggcagcacccccagccgcagcccccgctgcacaaggccaatcagcccccccacggtgtcccccaactctctctctacgaacatttcaacagcccacatcccacccctgcacctgcggacatcagccagaagcaagttcacaggcctctgcagacccctgacctctctggcttctactccctgacctcaggcagcatggggcagctcccccacactgtgagctggttcacccacccatccttgatgctaggttctggtgtacctggtcacccagcagccatcccccacccggccattgtgcccccctcagggaagcaggagctgcagcccttcgaccgcaacctgaagacacaagcagagtccaaggcagagaaggaggccaagaagccaaccatcaagaagcccctcaatgccttcatgctgtacatgaaggagatgagagccaaggtcattgcagagtgcacacttaaggagagcgctgccatcaaccagatcctgggccgcaggtggcacgcgctgtcgcgagaagagcaggccaagtactatgagctggcccgcaaggagaggcagctgcacatgcagctatacccaggctggtcagcgcgggacaactacgggaagaagaagaggcggtcgagggaaaagcaccaagaatccaccacaggaggaaaaagaaatgcattcggtacttacccggagaaggccgctgccccagccccgttccttccgatgacagtgctctaggctgccccgggtccccagctccccaggactcaccctcataccatctgctgccccgcttccccacagaactgcttactagccctgcggagccggcacctacatccccaggtctctccactgctctcagcctcccaaccccagggcccccacaggccccccgcagcaccctgcagagcacacaggtacagcaacaggaatctcagagacaggtggcctagcaggcacaggacacctggccgcctccaggagcctaccccctgaaagtgacagagacccagatctcatggaaactggccaggggtcctgttaacgtcatctcagggtccagaccctgaagatttcagaggctgcaggacttctgcctgaacctggggtcatcgattcaaactgctccaagtggtgggaatcagatctgtcttgatgtgtcatctaattaagggaatcccttgtacctatggctgcctgcatctattctttgtaccatctgtcttgccagccagaagcctctgcctccctagcttttctgctataggtcagagatgggctgaactgagcctagctaccttctctacccatctcccccatcccccactgccacaccctccccattcagacacttcatggaccaagaatgagctggtttgtcaaacaacatgtgagcatggtcacaagcacaaagctcaagatgacagctcttctaaggaaatggagaagctctgtttataaaaacaaaaacaaaaccagctgctactcataagttggaccagaggaagccccttactatgatctcaggagcttgcaagaagcaggaaggggaatggaataggttaagtttaggcctatcaacctaagcaacagaaataatctgacactaccttatcaggcaaattggggaggggagggtgtatctagctctagttcaaattatttggaagtgttccctgagaaacccaccagcctaagaagctctggccccaggcttgtcactagcagctgcagtcaacagttcaaagaagtcatggcccaaatccagtgtgcacccctccccattcacagagcctttttcacaattccatttccagttcatctatggcagtccagccagctcctgggcagcttgagagggcaaacccaaaacctcatgacagccagagcctgtctttcagcattcagtccgcctggccggctccagtttccccatggggctgcgggacagaggaccattacaactagatcaaggagcccagaaaacctccagtagtggacaacaggttttcaccatagcctacgttaacccatttttgagccaagcttcaaccctcagccttgaaaaacaagtctttaatttaatttttgttttttgcctaaatccaaagaaaaagggctgccgggccaggcgcggtggctcacgcctgtaatcccagcactttggcaggccgaggcaggtggatcacctgacgtcagtagtttgagaccagcctggccaacatggtgaaaccctgtatctactaaaaatacaaaaattagccggacgtggtggtgcgcgcatgtaatcccagctactcgggaggctgaggcggaagaatcacttgaacccgggaggcggaggttccagtgagccgagatggcgctattgcactccagtctgggtaacagggagactgcatctcaaaaaaaaaaaaaaaaaaaaaaaagggctgtccatgtattcacacacccctcaaaaaaagcctttagttcctactttagccactggtttctcagaatccaaagatcacatattctagtgtaacactgcaagaagtcttgagaaaaagattattgtagtgttcaaaatatttttgtattgttaatgcatcatcatagaaaaacttttaaacatgagaataaagatactttttactgggtttgtttttcaaagcctgaaaaaaa

SEQ ID NO: 168 - DNA, 1270 bp, Human
caggggacaggctgcagccggtgcagttacacgttttcctccaaggagcctcggacgttgtcacgggtttggggtcggggacagagcagtgaccatggccaggctggcgttgtctcctgtgcccagccactggatggtggcgttgctgctgctgctctcagctgagccagtaccagcagccagatcggaggaccggtaccggaatcccaaaggtagtgcttgttcgcggatctggcagagcccacgtttcatagccaggaaacggggcttcacggtgaaaatgcactgctacatgaacagcgcctccggcaatgtgagctggctctggaagcaggagatggacgagaatccccagcagctgaagctggaaaagggccgcatggaagagtcccagaacgaatctctcgccaccctcaccatccaaggcatccggtttgaggacaatggcatctacttctgtcagcagaagtgcaacaacacctcggaggtctaccagggctgcggcacagagctgcgagtcatgggattcagcaccttggcacagctgaagcagaggaacacgctgaaggatggtatcatcatgatccagacgctgctgatcatcctcttcatcatcgtgcctatcttcctgctgctggacaaggatgacagcaaggctggcatggaggaagatcacacctacgagggcctggacattgaccagacagccacctatgaggacatagtgacgctgcggacaggggaagtgaagtggtctgtaggtgagcacccaggccaggagtgagagccaggtcgccccatgacctgggtgcaggctccctggcctcagtgactgcttcggagctgcctggctcatggcccaacccctttcctggaccccccagctggcctctgaagctggcccaccagagctgccatttgtctccagcccctggtccccagctcttgccaaagggcctggagtagaaggacaacagggcagcaacttggagggagttctctggggatggacgggacccagccttctgggggtgctatgaggtgatccgtccccacacatgggatgggggaggcagagactggtccagagcccgcaaatggactcggagccgagggcctcccagcagagcttgggaagggccatggacccaactgggccccagaagagccacaggaacatcattcctctcccgcaaccactcccaccccagggaggccctggcctccagtgccttcccccgtggaataaacggtgtgtcctgagaaacca

SEQ ID NO: 169 - protein, 229 aa, Human
MARLALSPVPSHWMVALLLLLSAEPVPAARSEDRYRNPKGSACSRIWQSPRFIARKRGFTVKMHCYMNSASGNVSWLWKQEMDENPQQLKLEKGRMEESQNESLATLTIQGIRFEDNGIYFCQQKCNNTSEVYQGCGTELRVMGFSTLAQLKQRNTLKDGIIMIQTLLIILFIIVPIFLLLDKDDSKAGMEEDHTYEGLDIDQTATYEDIVTLRTGEVKWSVGEHPGQE

SEQ ID NO: 170 - DNA, 1364 bp, Human
aaaatcaggaacttgtgctggccctgcaatgtcaagggagggggctcacccagggctcctgtagctcagggggcaggcctgagccctgcacccgccccacgaccgtccagcccctgacgggcaccccatcctgaggggctctgcattggcccccaccgaggcaggggatctgaccgactcggagcccggctggatgttacaggcgtgcaaaatggaagggtttcccctcgtcccccctccatcagaagacctggtgccctatgacacggatctataccaacgccaaacgcacgagtattacccctatctcagcagtgatggggagagccatagcgaccattactgggacttccacccccaccacgtgcacagcgagttcgagagcttcgccgagaacaacttcacggagctccagagcgtgcagcccccgcagctgcagcagctctaccgccacatggagctggagcagatgcacgtcctcgatacccccatggtgccaccccatcccagtcttggccaccaggtctcctacctgccccggatgtgcctccagtacccatccctgtccccagcccagcccagctcagatgaggaggagggcgagcggcagagccccccactggaggtgtctgacggcgaggcggatggcctggagcccgggcctgggctcctgcctggggagacaggcagcaagaagaagatccgcctgtaccagttcctgttggacctgctccgcagcggcgacatgaaggacagcatctggtgggtggacaaggacaagggcaccttccagttctcgtccaagcacaaggaggcgctggcgcaccgctggggcatccagaagggcaaccgcaagaagatgacctaccagaagatggcgcgcgcgctgcgcaactacggcaagacgggcgaggtcaagaaggtgaagaagaagctcacctaccagttcagcggcgaagtgctgggccgcgggggcctggccgagcggcgccacccgccccactgagcccgcagcccccgccggccccgccaggcctccccgctggccatagcattaagccctcgcccggcccggacacagggaggacgctcccggggcccagaggcaggactgtggcgggccgggctccgtcacccgcccctccccccactccaggccccctccacatcccgcttcgcctccctccaggactccaccccggctcccgacgccagctgggcgtcagacccaccggcaaccttgcagaggacgacccggggtactgccttgggagtctcaagtccgtatgtaaatcagatctcccctctcacccctcccacccattaacctcctcccaaaaaacaagtaaagttattctcaatcc

SEQ ID NO: 171 - protein, 264 aa, Human
MEGFPLVPPPSEDLVPYDTDLYQRQTHEYYPYLSSDGESHSDHYWDFHPHHVHSEFESFAENNFTELQSVQPPQLQQLYRHMELEQMHVLDTPMVPPHPSLGHQVSYLPRMCLQYPSLSPAQPSSDEEEGERQSPPLEVSDGEADGLEPGPGLLPGETGSKKKIRLYQFLLDLLRSGDMKDSIWWVDKDKGTFQFSSKHKEALAHRWGIQKGNRKKMTYQKMARALRNYGKTGEVKKVKKKLTYQFSGEVLGRGGLAERRHPPH

SEQ ID NO: 172 - DNA, 900 bp, Human
gtgccccgcgctccccgctagcatgtcgtcctgcagccgcgtggcgctggtgaccggggccaacaggggcatcggcttggccatcgcgcgcgaactgtgccgacagttctctggggatgtggtgctcaccgcgcgggacgtggcgcggggccaggcggccgtgcagcagctgcaggcggagggcctgagcccgcgcttccaccaactggacatcgacgacttgcagagcatccgcgccctgcgcgacttcctgcgcaaggagtacggggggctcaacgtactggtcaacaacgcggccgtcgccttcaagagtgatgatccaatgccctttgacattaaagctgagatgacactgaagacaaatttttttgccactagaaacatgtgcaacgagttactgccgataatgaaacctcatgggagagtggtgaatatcagtagtttgcagtgtttaagggcttttgaaaactgcagtgaagatctgcaggaaaggttccacagtgagacactcacagaaggagacctggtggatctcatgaaaaagtttgtggaggacacaaaaaatgaggtgcatgagagggaaggctggcccaactcaccttatggggtgtccaagttgggggtcacggtcttatcgaggatcctggccaggcgtctggatgagaagaggaaagctgacaggattctggtgaatgcgtgctgcccaggaccagtgaagacagacatggatgggaaagacagcatcaggactgtggaggagggggctgagacccctgtctacttggccctcttgcctccagatgccactgagccacaaggccagttggtccatgacaaagttgtgcaaaactggtaaacgtctgcttcggagcttgctgcttaataaatgttggtggaatg

SEQ ID NO: 173 - protein, 277 aa, Human
MSSCSRVALVTGANRGIGLAIARELCRQFSGDVVLTARDVARGQAAVQQLQAEGLSPRFHQLDIDDLQSIRALRDFLRKEYGGLNVLVNNAAVAFKSDDPMPFDIKAEMTLKTNFFATRNMCNELLPIMKPHGRVVNISSLQCLRAFENCSEDLQERFHSETLTEGDLVDLMKKFVEDTKNEVHEREGWPNSPYGVSKLGVTVLSRILARRLDEKRKADRILVNACCPGPVKTDMDGKDSIRTVEEGAETPVYLALLPPDATEPQGQLVHDKVVQNW

SEQ ID NO: 174 - DNA, 1311 bp, Human
gtaagtctgctggcctccgccatcttagtaaagtaacagtcccatgaaacaaagatgcagtcgggcactcactggagagttctgggcctctgcctcttatcagttggcgtttgggggcaagatggtaatgaagaaatgggtggtattacacagacaccatataaagtctccatctctggaaccacagtaatattgacatgccctcagtatcctggatctgaaatactatggcaacacaatgataaaaacataggcggtgatgaggatgataaaaacataggcagtgatgaggatcacctgtcactgaaggaattttcagaattggagcaaagtggttattatgtctgctaccccagaggaagcaaaccagaagatgcgaacttttatctctacctgagggcaagagtgtgtgagaactgcatggagatggatgtgatgtcggtggccacaattgtcatagtggacatctgcatcactgggggcttgctgctgctggtttactactggagcaagaatagaaaggccaaggccaagcctgtgacacgaggagcgggtgctggcggcaggcaaaggggacaaaacaaggagaggccaccacctgttcccaacccagactatgagcccatccggaaaggccagcgggacctgtattctggcctgaatcagagacgcatctgaccctctggagaacactgcctcccgctggcccaggtctcctctccagtccccctgcgactccctgtttcctgggctagtcttggaccccacgagagagaatcgttcctcagcctcatggtgaactcgcgccctccagcctgatcccccgctccctcctccctgccttctctgctggtacccagtcctaaaatattgctgcttcctcttcctttgaagcatcatcagtagtcacaccctcacagctggcctgccctcttgccaggatatttatttgtgctattcactcccttccctttggatgtaacttctccgttcagttccctccttttcttgcatgtaagttgtcccccatcccaaagtattccatctacttttctatcgccgtccccttttgcagccctctctggggatggactgggtaaatgttgacagaggccctgccccgttcacagatcctggccctgagccagccctgtgctcctccctcccccaacactccctaccaaccccctaatcccctactccctccaaccccccctcccactgtaggccactggatggtcatttggcatctccgtatatgtgctctggctcctcagctgagagagaaaaaaataaactgtatttggctgc

SEQ ID NO: 175 - protein, 207 aa, Human
MQSGTHWRVLGLCLLSVGVWGQDGNEEMGGITQTPYKVSISGTTVILTCPQYPGSEILWQHNDKNIGGDEDDKNIGSDEDHLSLKEFSELEQSGYYVCYPRGSKPEDANFYLYLRARVCENCMEMDVMSVATIVIVDICITGGLLLLVYYWSKNRKAKAKPVTRGAGAGGRQRGQNKERPPPVPNPDYEPIRKGQRDLYSGLNQRRI

SEQ ID NO: 176 - DNA, 892 bp, Human
gcgcgccagtttcaggatgcagggtctaggagaggagccgcaatcgtgtctggggccccagccaggctggccggagctcctgtttccgctgctctgctgcctgcccggggtaccaacatggcccagaagcgtcctgcctgcaccctgaagcctgagtgtgtccagcagctgctggtttgctcccaggaggccaagaagtcagcctactgcccctacagtcactttcctgtgggggctgccctgctcacccaggaggggagaatcttcaaagggtgcaacatagaaaatgcctgctacccgctgggcatctgtgctgaacggaccgctatccagaaggccgtctcagaagggtacaaggatttcagggcaattgctatcgccagtgacatgcaagatgattttatctctccatgtggggcctgcaggcaagtcatgagagagtttggcaccaactggcccgtgtacatgaccaagccggatggtacgtatattgtcatgacggtccaggagctgctgccctcctcctttgggcctgaggacctgcagaagactcagtgacagccagagaatgcccactgcctgtaacagccacctggagaacttcataaagatgtctcacagccctggggacacctgcccagtggccccagcctacagggactgggcaaagatgatgtttccagattacactccagcctgagtcagcacccctcctagcaacctgccttgggacttagaacaccgccgcccccctgccccacctttcctttccttcctgtgggccctctttcaaagtccagcctagtctggactgcttccccatcagccttcccaaggttctatcctgttccgagcaacttttctaattataaacatcacagaacatcctgga

SEQ ID NO: 177 - protein, 146 aa, Human [sequence omitted]

SEQ ID NO: 178 - DNA, 6928 bp, Human
ggcgggagcgcgtgcgcccgaggacccggccggaaggcttgcgccagctcaggatgaggacaggctgggcgacccctcgccgcccggcggggctcctcatgctgctcttctggttcttcgatctcgcggagccctctggccgcgcagctaatgaccccttcaccatcgtccatggaaatacgggcaagtgcatcaagccagtgtatggctggatagtagcagacgactgtgatgaaactgaggacaagttatggaagtgggtgtcccagcatcggctctttcatttgcactcccaaaagtgccttggcctcgatattaccaaatcggtaaatgagctgagaatgttcagctgtgactccagtgccatgctgtggtggaaatgtgagcaccactctctgtacggagctgcccggtaccggctggctctgaaggatggacatggcacagcaatctcaaatgcatctgatgtctggaagaaaggaggctcagaggaaagcctttgtgaccagccttatcatgagatctataccagagatgggaactcttatgggagaccttgtgaatttccattcttaattgatgggacctggcatcatgattgcattcttgatgaagatcatagtgggccatggtgtgccaccaccttaaattatgaatatgaccgaaagtggggcatctgcttaaagcctgaaaacggttgtgaagataattgggaaaagaacgagcagtttggaagttgctaccaatttaatactcagacggctctttcttggaaagaagcttatgtttcatgtcagaatcaaggagctgatttactgagcatcaacagtgctgctgaattaacttaccttaaagaaaaagaaggcattgctaagattttctggattggtttaaatcagctatactctgctagaggctgggaatggtcagaccacaaaccattaaactttctcaactgggatccagacaggcccagtgcacctactataggtggctccagctgtgcaagaatggatgctgagtctggtctgtggcagagcttttcctgtgaagctcaactgccctatgtctgcaggaaaccattaaataatacagtggagttaacagatgtctggacatactcagatacccgctgtgatgcaggctggctgccaaataatggattttgctatctgctggtaaatgaaagtaattcctgggataaggcacatgcgaaatgcaaagccttcagtagtgacctaatcagcattcattctctagcagatgtggaggtggttgtcacaaaactccataatgaggatatcaaagaagaagtgtggataggccttaagaacataaacataccaactttatttcagtggtcagatggtactgaagttactctaacatattgggatgagaatgagccaaatgttccctacaataagacgcccaactgtgtttcctacttaggagagctaggtcagtggaaagtccaatcatgtgaggagaaactaaaatatgtatgcaagagaaagggagaaaaactgaatgacgcaagttctgataagatgtgtcctccagatgagggctggaagagacatggagaaacctgttacaagatttatgaggatgaggtcccttttggaacaaactgcaatctgactatcactagcagatttgagcaagaatacctaaatgatttgatgaaaaagtatgataaatctctaagaaaatacttctggactggcctgagagatgtagattcttgtggagagtataactgggcaactgttggtggaagaaggcgggctgtaaccttttccaactggaattttcttgagccagcttccccgggcggctgcgtggctatgtctactggaaagtctgttggaaagtgggaggtgaaggactgcagaagcttcaaagcactttcaatttgcaagaaaatgagtggaccccttgggcctgaagaagcatcccctaagcctgatgacccctgtcctgaaggctggcagagtttccccgcaagtctttcttgttataaggtattccatgcagaaagaattgtaagaaagaggaactgggaagaagctgaacgattctgccaagcccttggagcacacctttctagcttcagccatgtggatgaaataaaggaatttcttcactttttaacggaccagttcagtggccagcattggctgtggattggtttgaataaaaggagcccagatttacaaggatcctggcaatggagtgatcgtacaccagtgtctactattatcatgccaaatgagtttcagcaggattatgacatcagagactgtgctgctgtcaaggtatttcataggccatggcgaagaggctggcatttctatgatgatagagaatttatttatttgaggccttttgcttgtgatacaaaacttgaatgggtgtgccaaattccaaaaggccgtactccaaaaacaccagactggtacaatccagaccgtgctggaattcatggacctccacttataattgaaggaagtgaatattggtttgttgctgatcttcacctaaactatgaagaagccgtcctgtactgtgccagcaatcacagctttcttgcgactataacatcttttgtgggactaaaagccatcaaaaacaaaatagcaaatatatctggtgatggacagaagtggtggataagaattagcgagtggccaatagatgatcattttacatactcacgatatccatggcaccgctttcctgtgacatttggagaggaatgcttgtacatgtctgccaagacttggcttatcgacttaggtaaaccaacagactgtagtaccaagttgcccttcatctgtgaaaaatataatgtttcttcgttagagaaatacagcccagattctgcagctaaagtgcaatgttctgagcaatggattccttttcagaataagtgttttctaaagatcaaacccgtgtctctcacattttctcaagcaagcgatacctgtcactcctatggtggcacccttccttcagtgttgagccagattgaacaagactttattacatccttgcttccggatatggaagctactttatggattggtttgcgctggactgcctatgaaaagataaacaaatggacagataacagagagctgacgtacagtaactttcacccattattggttagtgggaggctgagaataccagaaaatttttttgaggaagagtctcgctaccactgtgccctaatactcaacctccaaaaatcaccgtttactgggacgtggaattttacatcctgcagtgaacgccactttgtgtctctctgtcagaaatattcagaagttaaaagcagacagacgttgcagaatgcttcagaaactgtaaagtatctaaataatctgtacaaaataatcccaaagactctgacttggcacagtgctaaaagggagtgtctgaaaagtaacatgcagctggtgagcatcacggacccttaccagcaggcattcctcagtgtgcaggcgctccttcacaactcttccttatggatcggactcttcagtcaagatgatgaactcaactttggttggtcagatgggaaacgtcttcattttagtcgctgggctgaaactaatgggcaactcgaagactgtgtagtattagacactgatggattctggaaaacagttgattgcaatgacaatcaaccaggtgctatttgctactattcaggaaatgagactgaaaaagaggtcaaaccagttgacagtgttaaatgtccatctcctgttctaaatactccgtggataccatttcagaactgttgctacaatttcataataacaaagaataggcatatggcaacaacacaggatgaagttcatactaaatgccagaaactgaatccaaaatcacatattctgagtattcgagatgaaaaggagaataactttgttcttgagcaactgctgtacttcaattatatggcttcatgggtcatgttaggaataacttatagaaataattctcttatgtggtttgataagaccccactgtcatatacacattggagagcaggaagaccaactataaaaaatgagaagtttttggctggtttaagtactgacggcttctgggatattcaaacctttaaagttattgaagaagcagtttattttcaccagcacagcattcttgcttgtaaaattgaaatggttgactacaaagaagaacataatactacactgccacagtttatgccatatgaagatggtatttacagtgttattcaaaaaaaggtaacatggtatgaagcattaaacatgtgttctcaaagtggaggtcacttggcaagcgttcacaaccaaaatggccagctctttctggaagatattgtaaaacgtgatggatttccactatgggttgggctctcaagtcatgatggaagtgaatcaagttttgaatggtctgatggtagtacatttgactatatcccatggaaaggccaaacatctcctggaaattgtgttctcttggatccaaaaggaacttggaaacatgaaaaatgcaactctgttaaggatggtgctatttgttataaacctacaaaatctaaaaagctgtcccgtcttacatattcatcaagatgtccagcagcaaaagagaatgggtcacggtggatccagtacaagggtcactgttacaagtctgatcaggcattgcacagtttttcagaggccaaaaaattgtgttcaaaacatgatcactctgcaactatcgtttccataaaagatgaagatgagaataaatttgtgagcagactgatgagggaaaataataacattaccatgagagtttggcttggattatctcaacattctgttgaccagtcttggagttggttagatggatcagaagtgacatttgtcaaatgggaaaataaaagtaagagtggtgttggaagatgtagcatgttgatagcttcaaatgaaacttggaaaaaagttgaatgtgaacatggttttggaagagttgtctgcaaagtgcctctgggccctgattacacagcaatagctatcatagttgccacactaagtatcttagttctcatgggcggactgatttggttcctcttccaaaggcaccgtttgcacctggcgggtttctcatcagttcgatatgcacaaggagtgaatgaagatgagattatgcttccttctttccatgactaaattcttctaaaagttttctaatttgcactaatgtggttatggagaaattagtcacttaaaatgtcccagtgtcagtatttactctgctccaaagtagaactcttaaatactttttcagttgtttagatcttaggcatgtgctggtatccacagttaattccctgctaaatgccatgtttatcaccctaattaatagaatggaggggactccaaagctggaactgaagtccaaattgtttgtacagtaatatgtttaatgttcattttctctgtatgaatgtgattggtaactaggatatgtatattttaatagaatttttaacaaaacttcttagaaaattaaaataggcatattactaggtgacatgtctactttttaatttttaagagcatccggccaaatgcaaaattagtacctcaaagtaaaaattgaactgtaaactctatcagcattgtttcaaaatagtcatttttagcactggggaaaaataaacaataagacatgcttactttttaatttttatttttttgagactgagtctctctctgttgcccaggctggagtacaatggcgtgatctcggctcactgcaaatctccgcctcccaggttcaagcgattctcctgcctcagcctcctgagtagctgggattacaggcaactgccaccatgcccggctaatttttgtatttttagtagagatggggtttcaccatgttggccaggctggtctcgaactcgtgaccgcagtgatcctcccgcctcggcctcccaaagtgctgggattacaggcatgagccaccgcgcctggcctctgcttactttttatatagcaaaatgattccccttggcaagatgtttcttatattattccaaagttatttcataccattattatgtaaatatgaagagtttttttctgtttataattgtttataaaacaatgacttttaaagatttagtgcttaacattttcccaagtgtgggaacattatttttagattgagtaggtaccttgtagcagtgtgctttgcattttctgatgtattacatgactgtttcttttgtaaagagaatcaactaggtatttaagactgataattttacaatttatatgcttcacatagcatgtcaacttttgactaagaattttgttttacttttttaacatgtgttaaacagagaaagggtccatgaaggaaagtgtatgagttgcatttgtaaaaatgagactttttcagtggaactctaaaccttgtgatgactactaacaaatgtaaaattatgagtgattaagaaaacattgctttgtggttatcactttaagttttgacacctagattatagtcttagtaatagcatccactggaaaaggtgaaaatgttttattcagcatttaacttacatttgtactttagagtatttttgtataaaatccatagatttattttacatttagagtatttacactatgataaagttgtaaataattttctaagacagtttttatatagtctacagttgtcctgatttcttattgaatttgttagactagttctcttgtcttgtgatctgtgtacaattttagtcactaagactttcctccaagaactaagccaacttgatgtgaaaagcacggctgtatataatggtgatgtcataataaagttgttttatcttttaagtaaaaaaaaaaaaaaaaaaaaa

SEQ ID NO: 179 - protein, 1722 aa, Human
MRTGWATPRRPAGLLMLLFWFFDLAEPSGRAANDPFTIVHGNTGKCIKPVYGWIVADDCDETEDKLWKWVSQHRLFHLHSQKCLGLDITKSVNELRMFSCDSSAMLWWKCEHHSLYGAARYRLALKDGHGTAISNASDVWKKGGSEESLCDQPYHEIYTRDGNSYGRPCEFPFLIDGTWHHDCILDEDHSGPWCATTLNYEYDRKWGICLKPENGCEDNWEKNEQFGSCYQFNTQTALSWKEAYVSCQNQGADLLSINSAAELTYLKEKEGIAKIFWIGLNQLYSARGWEWSDHKPLNFLNWDPDRPSAPTIGGSSCARMDAESGLWQSFSCEAQLPYVCRKPLNNTVELTDVWTYSDTRCDAGWLPNNGFCYLLVNESNSWDKAHAKCKAFSSDLISIHSLADVEVVVTKLHNEDIKEEVWIGLKNINIPTLFQWSDGTEVTLTYWDENEPNVPYNKTPNCVSYLGELGQWKVQSCEEKLKYVCKRKGEKLNDASSDKMCPPDEGWKRHGETCYKIYEDEVPFGTNCNLTITSRFEQEYLNDLMKKYDKSLRKYFWTGLRDVDSCGEYNWATVGGRRRAVTFSNWNFLEPASPGGCVAMSTGKSVGKWEVKDCRSFKALSICKKMSGPLGPEEASPKPDDPCPEGWQSFPASLSCYKVFHAERIVRKRNWEEAERFCQALGAHLSSFSHVDEIKEFLHFLTDQFSGQHWLWIGLNKRSPDLQGSWQWSDRTPVSTIIMPNEFQQDYDIRDCAAVKVFHRPWRRGWHFYDDREFIYLRPFACDTKLEWVCQIPKGRTPKTPDWYNPDRAGIHGPPLIIEGSEYWFVADLHLNYEEAVLYCASNHSFLATITSFVGLKAIKNKIANISGDGQKWWIRISEWPIDDHFTYSRYPWHRFPVTFGEECLYMSAKTWLIDLGKPTDCSTKLPFICEKYNVSSLEKYSPDSAAKVQCSEQWIPFQNKCFLKIKPVSLTFSQASDTCHSYGGTLPSVLSQIEQDFITSLLPDMEATLWIGLRWTAYEKINKWTDNRELTYSNFHPLLVSGRLRIPENFFEEESRYHCALILNLQKSPFTGTWNFTSCSERHFVSLCQKYSEVKSRQTLQNASETVKYLNNLYKIIPKTLTWHSAKRECLKSNMQLVSITDPYQQAFLSVQALLHNSSLWIGLFSQDDELNFGWSDGKRLHFSRWAETNGQLEDCVVLDTDGFWKTVDCNDNQPGAICYYSGNETEKEVKPVDSVKCPSPVLNTPWIPFQNCCYNFIITKNRHMATTQDEVHTKCQKLNPKSHILSIRDEKENNFVLEQLLYFNYMASWVMLGITYRNNSLMWFDKTPLSYTHWRAGRPTIKNEKFLAGLSTDGFWDIQTFKVIEEAVYFHQHSILACKIEMVDYKEEHNTTLPQFMPYEDGIYSVIQKKVTWYEALNMCSQSGGHLASVHNQNGQLFLEDIVKRDGFPLWVGLSSHDGSESSFEWSDGSTFDYIPWKGQTSPGNCVLLDPKGTWKHEKCNSVKDGAICYKPTKSKKLSRLTYSSRCPAAKENGSRWIQYKGHCYKSDQALHSFSEAKKLCSKHDHSATIVSIKDEDENKFVSRLMRENNNITMRVWLGLSQHSVDQSWSWLDGSEVTFVKWENKSKSGVGRCSMLIASNETWKKVECEHGFGRVVCKVPLGPDYTAIAIIVATLSILVLMGGLIWFLFQRHRLHLAGFSSVRYAQGVNEDEIMLPSFHD

SEQ ID NO: 180 - DNA, 1322 bp, Human
aactcattctgaagaggctgacgattttactgtctcatttttttcctttctccagaatgggttctgggtgggtcccctgggtggtggctctgctagtgaatctgacccgactggattcctccatgactcaaggcacagactctccagaagattttgtgattcaggcaaaggctgactgttacttcaccaacgggacagaaaaggtgcagtttgtggtcagattcatctttaacttggaggagtatgtacgtttcgacagtgatgtggggatgtttgtggcattgaccaagctggggcagccagatgctgagcagtggaacagccggctggatctcttggagaggagcagacaggccgtggatggggtctgtagacacaactacaggctgggcgcacccttcactgtggggagaaaagtgcaaccagaggtgacagtgtacccagagaggaccccactcctgcaccagcataatctgctgcactgctctgtgacaggcttctatccaggggatatcaagatcaagtggttcctgaatgggcaggaggagagagctggggtcatgtccactggccctatcaggaatggagactggacctttcagactgtggtgatgctagaaatgactcctgaacttggacatgtctacacctgccttgtcgatcactccagcctgctgagccctgtttctgtggagtggagagctcagtctgaatattcttggagaaagatgctgagtggcattgcagccttcctacttgggctaatcttccttctggtgggaatcgtcatccagctaagggctcagaaaggatatgtgaggacgcagatgtctggtaatgaggtctcaagagctgttctgctccctcagtcatgctaaggtcctcactgaagcttctctctctggagcctgaagtagtgatgagtagtctgggccctgggtgaggtaaaggacattcatgaggtcaatgttctgggaataactctcttccctgatccttggaggagcccgaactgattctggagctctgtgttctgagatcatgcatctcccacccatctgcccttctcccttctacgtgtacatcattaatccccattgccaagggcattgtccagaaactcccctgagaccttactccttccagccccaaatcatttacttttctgtggtccagccctactcctataagtcatgatctccaaagctttctgtcttccaactgcagtctccacagtcttcagaagacaaatgctcaggtagtcactgtttccttttcactgtttttaaaaaccttttattgtcaaataaaatggagataca

SEQ ID NO: 181 - protein, 273 aa, Human
MGSGWVPWVVALLVNLTRLDSSMTQGTDSPEDFVIQAKADCYFTNGTEKVQFVVRFIFNLEEYVRFDSDVGMFVALTKLGQPDAEQWNSRLDLLERSRQAVDGVCRHNYRLGAPFTVGRKVQPEVTVYPERTPLLHQHNLLHCSVTGFYPGDIKIKWFLNGQEERAGVMSTGPIRNGDWTFQTVVMLEMTPELGHVYTCLVDHSSLLSPVSVEWRAQSEYSWRKMLSGIAAFLLGLIFLLVGIVIQLRAQKGYVRTQMSGNEVSRAVLLPQSC

SEQ ID NO: 182 - DNA, 885 bp, Human
agcctacgcacgaaagtgactagggaggaaggatattataaagtgatgcaaacagaaattccaccagcctccatgtatcatcatgtgtcataactcagtcaagctcagtgagcattctcagcacattgcctcaacagcttcaaggtgagccagctcaagactttgctctccaccaggcagaagatgacagactgtgaatttggatatatttacaggctggctcaggactatctgcagtgcgtcctacagataccacaacctggatcaggtccaagcaaaacgtccagagtgctacaaaatgttgcgttctcagtccaaaaagaagtggaaaagaatctgaagtcatgcttggacaatgttaatgttgtgtccgtagacactgccagaacactattcaaccaagtgatggaaaaggagtttgaagacggcatcattaactggggaagaattgtaaccatatttgcatttgaaggtattctcatcaagaaacttctacgacagcaaattgccccggatgtggatacctataaggagatttcatattttgttgcggagttcataatgaataacacaggagaatggataaggcaaaacggaggctgggaaaatggctttgtaaagaagtttgaacctaaatctggctggatgacttttctagaagttacaggaaagatctgtgaaatgctatctctcctgaagcaatactgttgaccagaaaggacactccatattgtgaaaccggcctaatttttctgactgatatggaaacgattgccaacacatacttctacttttaaataaacaactttgatgatgtaacttgaccttccagagttatggaaattttgtccccatgtaatgaataaattgtatgtatttttctct

SEQ ID NO: 183 - protein, 175 aa, Human
MTDCEFGYIYRLAQDYLQCVLQIPQPGSGPSKTSRVLQNVAFSVQKEVEKNLKSCLDNVNVVSVDTARTLFNQVMEKEFEDGIINWGRIVTIFAFEGILIKKLLRQQIAPDVDTYKEISYFVAEFIMNNTGEWIRQNGGWENGFVKKFEPKSGWMTFLEVTGKICEMLSLLKQYC

SEQ ID NO: 184 - DNA, 2261 bp, Human
gaaatcaggctccgggccggccgaagggcgcaactttcccccctcggcgccccaccggctcccgcgcgcctcccctcgcgcccgagcttcgagccaagcagcgtcctggggagcgcgtcatggccttaccagtgaccgccttgctcctgccgctggccttgctgctccacgccgccaggccgagccagttccgggtgtcgccgctggatcggacctggaacctgggcgagacagtggagctgaagtgccaggtgctgctgtccaacccgacgtcgggctgctcgtggctcttccagccgcgcggcgccgccgccagtcccaccttcctcctatacctctcccaaaacaagcccaaggcggccgaggggctggacacccagcggttctcgggcaagaggttgggggacaccttcgtcctcaccctgagcgacttccgccgagagaacgagggctactatttctgctcggccctgagcaactccatcatgtacttcagccacttcgtgccggtcttcctgccagcgaagcccaccacgacgccagcgccgcgaccaccaacaccggcgcccaccatcgcgtcgcagcccctgtccctgcgcccagaggcgtgccggccagcggcggggggcgcagtgcacacgagggggctggacttcgcctgtgatatctacatctgggcgcccttggccgggacttgtggggtccttctcctgtcactggttatcaccctttactgcaaccacaggaaccgaagacgtgtttgcaaatgtccccggcctgtggtcaaatcgggagacaagcccagcctttcggcgagatacgtctaaccctgtgcaacagccactacattacttcaaactgagatccttccttttgagggagcaagtccttccctttcattttttccagtcttcctccctgtgtattcattctcatgattattattttagtgggggcggggtgggaaagattactttttctttatgtgtttgacgggaaacaaaactaggtaaaatctacagtacaccacaagggtcacaatactgttgtgcgcacatcgcggtagggcgtggaaaggggcaggccagagctacccgcagagttctcagaatcatgctgagagagctggaggcacccatgccatctcaacctcttccccgcccgttttacaaagggggaggctaaagcccagagacagcttgatcaaaggcacacagcaagtcagggttggagcagtagctggagggaccttgtctcccagctcagggctctttcctccacaccattcaggtctttctttccgaggcccctgtctcagggtgaggtgcttgagtctccaacggcaagggaacaagtacttcttgatacctgggatactgtgcccagagcctcgaggaggtaatgaattaaagaagagaactgcctttggcagagttctataatgtaaacaatatcagactttttttttttataatcaagcctaaaattgtatagacctaaaataaaatgaagtggtgagcttaaccctggaaaatgaatccctctatctctaaagaaaatctctgtgaaacccctatgtggaggcggaattgctctcccagcccttgcattgcagaggggcccatgaaagaggacaggctacccctttacaaatagaatttgagcatcagtgaggttaaactaaggccctcttgaatctctgaatttgagatacaaacatgttcctgggatcactgatgactttttatactttgtaaagacaattgttggagagcccctcacacagccctggcctctgctcaactagcagatacagggatgaggcagacctgactctcttaaggaggctgagagcccaaactgctgtcccaaacatgcacttccttgcttaaggtatggtacaagcaatgcctgcccattggagagaaaaaacttaagtagataaggaaataagaaccactcataattcttcaccttaggaataatctcctgttaatatggtgtacattcttcctgattattttctacacatacatgtaaaatatgtctttcttttttaaatagggttgtactatgctgttatgagtggctttaatgaataaacatttgtagcatcctctttaatgggtaaacagcaaaaaaaaaaaaaaaaaaaaaaaaaaaaaaaaaaaaaaaaaaaaaaaaaaaaaaaaaaaaaaaaaaaaaaaaaaaaaaaaaaaaaaaaaaaaaaaaaaaaaaaaaaaaaaaaaaaaaaaaaaaaa

SEQ ID NO: 185 - protein, 235 aa, Human
MALPVTALLLPLALLLHAARPSQFRVSPLDRTWNLGETVELKCQVLLSNPTSGCSWLFQPRGAAASPTFLLYLSQNKPKAAEGLDTQRFSGKRLGDTFVLTLSDFRRENEGYYFCSALSNSIMYFSHFVPVFLPAKPTTTPAPRPPTPAPTIASQPLSLRPEACRPAAGGAVHTRGLDFACDIYIWAPLAGTCGVLLLSLVITLYCNHRNRRRVCKCPRPVVKSGDKPSLSARYV

SEQ ID NO: 186 - DNA, 4627 bp, Human
tcacttgcctgatatttccagtgtcagagggacacagccaacgtggggtcccttctaggctgacagccgctctccagccactgccgcgagcccgtctgctcccgccctgcccgtgcactctccgcagccgccctccgccaagccccagcgcccgctcccatcgccgatgaccgcggggaggaggatggagatgctctgtgccggcagggtccctgcgctgctgctctgcctgggtttccatcttctacaggcagtcctcagtacaactgtgattccatcatgtatcccaggagagtccagtgataactgcacagctttagttcagacagaagacaatccacgtgtggctcaagtgtcaataacaaagtgtagctctgacatgaatggctattgtttgcatggacagtgcatctatctggtggacatgagtcaaaactactgcaggtgtgaagtgggttatactggtgtccgatgtgaacacttctttttaaccgtccaccaacctttaagcaaagagtatgtggctttgaccgtgattcttattattttgtttcttatcacagtcgtcggttccacatattatttctgcagatggtacagaaatcgaaaaagtaaagaaccaaagaaggaatatgagagagttacctcaggggatccagagttgccgcaagtctgaatggcgccatcaaacttatgggcagggataacagtgtgcctggttaatattaatattccattttattaataatatttatgttgggtcaagtgttaggtcaataacactgtattttaatgtacttgaaaaatgtttttatttttgttttatttttgacagactatttgctaatgtataatgtgcagaaaatatttaatatcaaaagaaaattgatatttttatacaagtaatttcctgagctaaatgcttcattgaaagcttcaaagtttatatgcctggtgcacagtgcttagaagtaagcaattcccaggtcatagctcaagaattgttagcaaatgacagatttctgtaagcctatatatatagtcaaatcgatttagtaagtatgttttttatgttcctcaaatcagtgataattggtttgactgtaccatggtttgatatgtagttggcaccatggtatcatatattaaaacaataatgcaattagaatttgggagaagcaaatataggtcctgtgttaaacactacacatttgaaacaagctaaccctggggagtctatggtctcttcactcaggtctcagctataattctgttatatgaggggcagtggacagttccctatgccaactcacgactcctacaggtactagtcactcatctaccagattctgcctatgtaaaatgaattgaaaaacaattttctgtaatcttttatttaagtagtgggcatttcatagcttcacaatgttccttttttgtatattacaacatttatgtgaggtaattattgctcaacagacaattagaaaaaagtccacacttgaagcctaaatttgtgctttttaagaatatttttagactatttctttttataggggctttgctgaattctaacattaaatcacagcccaaaatttgatggactaattattattttaaaatatatgaagacaataattctacatgttgtcttaagatggaaatacagttatttcatcttttattcaaggaagttttaactttaatacagctcagtaaatggcttcttctagaatgtaaagttatgtatttaaagttgtatcttgacacaggaaatgggaaaaaacttaaaaattaatatggtgtatttttccaaatgaaaaatctcaattgaaagcttttaaaatgtagaaacttaaacacaccttcctgtggaggctgagatgaaaactagggctcattttcctgacatttgtttattttttggaagagacaaagatttcttctgcactctgagcccataggtctcagagagttaataggagtatttttgggctattgcataaggagccactgctgccaccacttttggattttatgggaggctccttcatcgaatgctaaacctttgagtagagtctccctggatcacataccaggtcagggaggatctgttcttcctctacgtttatcctggcatgtgctagggtaaacgaaggcataataagccatggctgacctctggagcaccaggtgccaggacttgtctccatgtgtatccatgcattatataccctggtgcaatcacacgactgtcatctaaagtcctggccctggcccttactattaggaaaataaacagacaaaaacaagtaaatatatatggtcctatacatattgtatatatattcatatacaaacatgtatgtatacatgaccttaatggatcatagaattgcagtcatttggtgctctgctaaccatttatataaaacttaaaaacaagagaaaagaaaaatcaattagatctaaacagttatttctgtttcctatttaatatagctgaagtcaaaatatgtaagaacacattttaaatactctacttacagttggccctctgtggttagttccacatctgtggattcaaccaaccaaggacggaaaatgcttaaaaaataatacaacaacaacaaaaaatacattataacaactatttacttttttttttttctttttgagatggagtctcgctctgttgcccaggttggagtgcagtggcacgatctcggctcactgcaacctcacctcccgggttcaagagatcctcctgcctcagcctcctgagcagctgggactacaggcgcatgccaccatgcccagctaatttttgtatttttagtagaggcggggtttcaccatgttggccaggatggtctcaatctcctaaccttgagatccaccctccacagcctcccaaactgctgggattacaggcgtgagccaccgcacgtagcatttacattaggtattacaagtaatgtaaagatgatttaagtatacaggaggatgtgaataggttatatgcaagcactatgcccttttatataagtgacttgaacatctgtgcccgattttagtatgtgcaggggggcgatctgggaatcagtcccctgtggataccaaggtacaactgtatttattaacgcttactagatgtgaggagagtctgaatattttcagtgatcttggctgtttcaaaaaaatctattgacttttcaataaatcagctgcaatccatttatttcatttacaaaagatttattgtaagcctctcaatcttggtttttcagttgatcttaagcatgtcaattcataaaaacaagtcatttttgtatttttcatctttaagaatgcttaaaaaagctaatccctaaaatagttagatctttgtaaatgcatattaaataataaagtatgacccacattactttttatgggtgaaaataagacaaaaataatagttttagtgaggatggtgctgagtaaacataaaaactgatttgctctcagctgatgtgtcctgtacacagtgggaagattttagttcacacttagtctaactcccccattttacagatttctcactatatatatttctagaaggggctatgcatattcaatgtattgagaaccaaagcaaccacaaatgcataaatgcataatttatggtcttcaaccaaggccacataataacccagttaacttactctttaaccaggaatattaagttctataactagtactcaaggtttaaccttaaaattaagatttccttaaccttaaccttaaaattgatattatattaaacatacataatacaatgtaactccactgttctcctgaatattttttgctctaatctctctgccgaaagtcaaagtgatgggagaattggtatactggtatgactacgtcttaagtcagatttttatttatgagtctttgagactaaattcaatcaccaccaggtatcaaatcaacttttatgcagcaaatatatgattctagtgtctgacttttgttaaattcagtaatgcagtttttaaaaacctgtatctgacccactttgtaatttttgctccaatatccattctgtagacttttgaaaaaaaagtttttaatttgatgcccaatatattctgaccgttaaaaaattcttgttcatatgggagaagggggagtaatgacttgtacaaacagtatttctggtgtatattttaatgtttttaaaaagagtaatttcatttaaatatctgttattcaaatttgatgatgttaaatgtaatataatgtattttctttttattttgcactctgtaattgcactttttaagtttgaagagccattttggtaaacggtttttattaaagatgctatggaacataaagttgtattgcatgcaatttaaagtaacttatttgactatgaatattatcggattactgaattgtatcaatttgtttgtgttcaatatcagctttgataattgtgtaccttaagatattgaaggagaaaatagataatttacaagatattattaatttttatttatttttcttgggaattgaaaaaaattgaaataaataaaaatgcattgaacatcttgcattcaaaatcttcactgac

SEQ ID NO: 187 - protein, 169 aa, Human
MTAGRRMEMLCAGRVPALLLCLGFHLLQAVLSTTVIPSCIPGESSDNCTALVQTEDNPRVAQVSITKCSSDMNGYCLHGQCIYLVDMSQNYCRCEVGYTGVRCEHFFLTVHQPLSKEYVALTVILIILFLITVVGSTYYFCRWYRNRKSKEPKKEYERVTSGDPELPQV

SEQ ID NO: 188 - DNA, 2329 bp, Human
gttttctacccaagaatgctacttcaggagatcagtcaaaaggttagggtgatggtgacggtggaaatatagaaaaaggaatttattcaagaggtattcaaaaagaagtgaaatagagatgagttggagatagattggataaaaagagtgagggagagggaggtgtcaggctgcagcccaggttctgagttgccaaagaggagtcttttcctccaggaaattgagacacgccggttgtgaaacctactgaagtgagcggcggcgccaggattcctgggaccccgacctctttgcagctcgcacagctaagggcgagggcgcccttcggcagaagcagcaaaccgccggcaagcccagcgaggagggctgccggggtctgggcttgggaattggctggcacccagcggaaagggacgtgagctgagcggcgggggagaagagtgcgcaggtcagagggcggcgcgcagcggcgctccgcgaggtccccacgccgggcgatatggggtgcctgctgtttctgctgctctgggcgctcctccaggcttggggaagcgctgaagtcccgcaaaggcttttccccctccgctgcctccagatctcgtccttcgccaatagcagctggacgcgcaccgacggcttggcgtggctgggggagctgcagacgcacagctggagcaacgactcggacaccgtccgctctctgaagccttggtcccagggcacgttcagcgaccagcagtgggagacgctgcagcatatatttcgggtttatcgaagcagcttcaccagggacgtgaaggaattcgccaaaatgctacgcttatcctatcccttggagctccaggtgtccgctggctgtgaggtgcaccctgggaacgcctcaaataacttcttccatgtagcatttcaaggaaaagatatcctgagtttccaaggaacttcttgggagccaacccaagaggccccactttgggtaaacttggccattcaagtgctcaaccaggacaagtggacgagggaaacagtgcagtggctccttaatggcacctgcccccaatttgtcagtggcctccttgagtcagggaagtcggaactgaagaagcaagtgaagcccaaggcctggctgtcccgtggccccagtcctggccctggccgtctgctgctggtgtgccatgtctcaggattctacccaaagcctgtatgggtgaagtggatgcggggtgagcaggagcagcagggcactcagccaggggacatcctgcccaatgctgacgagacatggtatctccgagcaaccctggatgtggtggctggggaggcagctggcctgtcctgtcgggtgaagcacagcagtctagagggccaggacatcgtcctctactggggtgggagctacacctccatgggcttgattgccttggcagtcctggcgtgcttgctgttcctcctcattgtgggctttacctcccggtttaagaggcaaacttcctatcagggcgtcctgtgactcgccttgccacatctgtgtctctggaacccaggacctctggacctcaggttcccaagacttcagtcctggtctgctcaggaattgaagatgtaaggaattgaagataggagagataccttgaaaaagtagagaacagtcatgaggcagctttcatcacacccttttaacatttatctaaaagaatttaaattctttttcaaaaattacactacaagtttataagcccaaatggctctgtgaaatcagaagtgcaaaggtgtgcaaacttgtatctgaagacctaccagggacaagcaggtaagagctgatgtgagtgtgtgtgatgggatctgtaaggaactggaacacacatgtcctatccaaaggaatcagctgcagctgcttgttgtcaagtataaagtcaggacctggcttggctttaaccgtttttcaagaaaactggaaatctggattttcagcgaacatgcctgattttaaaaggttgactcaagtttttacaaaatactatgtgggacacctcaaatacatacctactgactgatgacaaacccaggagtttgtgtgtcttttataaaaagtttgccctggatgtcatattggcagttggaggacacagtttctattgtaaatttggatttacgactgaagaaggacattttctctttaaaagaaagttaggttataagaaacagaggcgtctcacatttttacttggtgtaattaataaacgaagataaatcataaaaaaaaaaaaaaaaaaaaaaaaaaaaaaaaaaaaaaaaaaaaaaaaaaaaaaaaaaaaaaaaaaaaaaaaaaaaa

SEQ ID NO: 189 - DNA, 3100 bp, Human
actcgtctctggtaaagtctgagcaggacagggtggctgactggcagatccagaggttcccttggcagtccacgccaggccttcaccatggatcagttccctgaatcagtgacagaaaactttgagtacgatgatttggctgaggcctgttatattggggacatcgtggtctttgggactgtgttcctgtccatattctactccgtcatctttgccattggcctggtgggaaatttgttggtagtgtttgccctcaccaacagcaagaagcccaagagtgtcaccgacatttacctcctgaacctggccttgtctgatctgctgtttgtagccactttgcccttctggactcactatttgataaatgaaaagggcctccacaatgccatgtgcaaattcactaccgccttcttcttcatcggcttttttggaagcatattcttcatcaccgtcatcagcattgataggtacctggccatcgtcctggccgccaactccatgaacaaccggaccgtgcagcatggcgtcaccatcagcctaggcgtctgggcagcagccattttggtggcagcaccccagttcatgttcacaaagcagaaagaaaatgaatgccttggtgactaccccgaggtcctccaggaaatctggcccgtgctccgcaatgtggaaacaaattttcttggcttcctactccccctgctcattatgagttattgctacttcagaatcatccagacgctgttttcctgcaagaaccacaagaaagccaaagccattaaactgatccttctggtggtcatcgtgtttttcctcttctggacaccctacaacgttatgattttcctggagacgcttaagctctatgacttctttcccagttgtgacatgaggaaggatctgaggctggccctcagtgtgactgagacggttgcatttagccattgttgcctgaatcctctcatctatgcatttgctggggagaagttcagaagatacctttaccacctgtatgggaaatgcctggctgtcctgtgtgggcgctcagtccacgttgatttctcctcatctgaatcacaaaggagcaggcatggaagtgttctgagcagcaattttacttaccacacgagtgatggagatgcattgctccttctctgaagggaatcccaaagccttgtgtctacagagaacctggagttcctgaacctgatgctgactagtgaggaaagatttttgttgttatttcttacaggcacaaaatgatggacccaatgcacacaaaacaaccctagagtgttgttgagaattgtgctcaaaatttgaagaatgaacaaattgaactctttgaatgacaaagagtagacatttctcttactgcaaatgtcatcagaactttttggtttgcagatgacaaaaattcaactcagactagtttagttaaatgagggtggtgaatattgttcatattgtggcacaagcaaaagggtgtctgagccctcaaagtgaggggaaaccagggcctgagccaagctagaattccctctctctgactctcaaatcttttagtcattatagatcccccagactttacatgacacagctttatcaccagagagggactgacacccatgtttctctggccccaagggaaaattcccagggaagtgctctgataggccaagtttgtatcaggtgcccatccctggaaggtgctgttatccatggggaagggatatataagatggaagcttccagtccaatctcatggagaagcagaaatacatatttccaagaagttggatgggtgggtactattctgattacacaaaacaaatgccacacatcacccttaccatgtgcctgatccagcctctcccctgattacaccagcctcgtcttcattaagccctcttccatcatgtccccaaacctgcaagggctccccactgcctactgcatcgagtcaaaactcaaatgcttggcttctcatacgtccaccatggggtcctaccaatagattccccattgcctcctccttcccaaaggactccacccatcctatcagcctgtctcttccatatgacctcatgcatctccacctgctcccaggccagtaagggaaatagaaaaaccctgcccccaaataagaagggatggattccaaccccaactccagtagcttgggacaaatcaagcttcagtttcctggtctgtagaagagggataaggtacctttcacatagagatcatcctttccagcatgaggaactagccaccaactcttgcaggtctcaacccttttgtctgcctcttagacttctgctttccacacctgcactgctgtgctgtgcccaagttgtggtgctgacaaagcttggaagagcctgcaggtgccttggccgcgtgcatagcccagacacagaagaggctggttcttacgatggcacccagtgagcactcccaagtctacagagtgatagccttccgtaacccaactctcctggactgccttgaatatcccctcccagtcaccttgtgcaagcccctgcccatctgggaaaataccccatcattcatgctactgccaacctggggagccagggctatgggagcagcttttttttcccccctagaaacgtttggaacaatgtaaaactttaaagctcgaaaacaattgtaataatgctaaagaaaaagtcatccaatctaaccacatcaatattgtcattcctgtattcacccgtccagaccttgttcacactctcacatgtttagagttgcaatcgtaatgtacagatggttttataatctgatttgttttcctcttaacgttagaccacaaatagtgctcgctttctatgtagtttggtaattatcattttagaagactctaccagactgtgtattcattgaagtcagatgtggtaactgttaaattgctgtgtatctgatagctctttggcagtctatatgtttgtataatgaatgagagaataagtcatgttccttcaagatcatgtaccccaatttacttgccattactcaattgataaacatttaacttgtttccaatgtttagcaaatacatattttatagaacttc

SEQ ID NO: 190 - protein, 355 aa, Human
MDQFPESVTENFEYDDLAEACYIGDIVVFGTVFLSIFYSVIFAIGLVGNLLVVFALTNSKKPKSVTDIYLLNLALSDLLFVATLPFWTHYLINEKGLHNAMCKFTTAFFFIGFFGSIFFITVISIDRYLAIVLAANSMNNRTVQHGVTISLGVWAAAILVAAPQFMFTKQKENECLGDYPEVLQEIWPVLRNVETNFLGFLLPLLIMSYCYFRIIQTLFSCKNHKKAKAIKLILLVVIVFFLFWTPYNVMIFLETLKLYDFFPSCDMRKDLRLALSVTETVAFSHCCLNPLIYAFAGEKFRRYLYHLYGKCLAVLCGRSVHVDFSSSESQRSRHGSVLSSNFTYHTSDGDALLLL

SEQ ID NO: 191 - DNA, 1198 bp, Human
gccaggaaggcttgcaggttctgctgtttggttgctgaagggggtcagtgtgtgtatgtgtcatggaggtgggcagggaaggggagggctgtgcgtgggggagatgaggatatatatgctggtgtggctgagaaagcggaaccgagcctcgcatccatcggagggagccggggactgacagctctcagcacctgcttcctgctcctgcaccatgaaagtcctgctttgtgacctgctgctgctcagtctcttctccagtgtgttcagcagttgtcagagggactgtctcacatgccaggagaagctccacccagccctggacagcttcgacctggaggtgtgcatcctcgagtgcgaagagaaggtcttccccagccccctctggactccatgcaccaaggtcatggccaggagctcttggcagctcagccctgccgccccagagcatgtggcggctgctctctaccagccgagagcttcggagatgcagcatctgcggcgaatgccccgagtccggagcttgttccaggagcaggaagagcccgagcctggcatggaggaggctggtgagatggagcagaagcagctgcagaagagatttgggggcttcaccggggcccggaagtcggccaggaagttggccaatcagaagcggttcagtgagtttatgaggcaatacttggtcctgagcatgcagtccagccagcgccggcgcaccctgcaccagaatggtaatgtgtagccggaaggggcgctcctcccagctgtaccggccactgcaacccatgagcgtccaggtgatcccccaaacagcatgtgctcagmcccagacctgccgcctgggaatcaggattccttcttccccaaggcactgagcgcctgcagatcccgcaggcttcgtttgcctccagaaccttcccgtctgattgttcctccccagccccctggcatgtttcaccacaaccctgttgctacatcagagtgtatttttgtaattcctctagctaccatttcaatagccccatctctcctgctcacccgcctcttgccccttctaggggcaggtgaaaggaataggaaattgaacctggggttttgacttgccactgccataacttgtttgtaaaagagctgttctttttgactgattgttttaaacaacgatttctccattaaacttctactgagcaaatggtta

SEQ ID NO: 192 - protein, 176 aa, Human
MKVLLCDLLLLSLFSSVFSSCQRDCLTCQEKLHPALDSFDLEVCILECEEKVFPSPLWTPCTKVMARSSWQLSPAAPEHVAAALYQPRASEMQHLRRMPRVRSLFQEQEEPEPGMEEAGEMEQKQLQKRFGGFTGARKSARKLANQKRFSEFMRQYLVLSMQSSQRRRTLHQNGNV

SEQ ID NO: 193 - DNA, 3062 bp, Human
gacaagagctcagacctgaggagagtgactagcttctctgtgtcccaggtggccaccttccactgtggaagctcatggactccattgggtcttcagggttgcggcagggggaagaaaccctgagttgctctgaggagggcttgcccgggccctcagacagctcagagctggtgcaggagtgcctgcagcagttcaaggtgacaagggcacagctacagcagatccaagccagcctcttgggttccatggagcaggcgctgaggggacaggccagccctgcccctgcggtccggatgctgcctacatacgtggggtccaccccacatggcactgagcaaggagacttcgtggtgctggagctgggggccacaggggcctcactgcgtgttttgtgggtgactctaactggcattgaggggcatagggtggagcccagaagccaggagtttgtgatcccccaagaggtgatgctgggtgctggccagcagctctttgactttgctgcccactgcctgtctgagttcctggatgcgcagcctgtgaacaaacagggtctgcagcttggcttcagcttctctttcccttgtcaccagacgggcttggacaggagcaccctcatttcctggaccaaaggttttaggtgcagtggtgtggaaggccaggatgtggtccagctgctgagagatgccattcggaggcagggggcctacaacatcgacgtggttgctgtggtgaacgacacagtgggcaccatgatgggctgtgagccgggggtcaggccgtgtgaggttgggctagttgtagacacgggcaccaacgcgtgttacatggaggaggcacggcatgtggcagtgctggacgaagaccggggccgcgtctgcgtcagcgtcgagtggggctccttaagcgatgatggggcgctgggaccagtgctgaccaccttcgaccataccctggaccatgagtccctgaatcctggtgctcagaggtttgagaagatgatcggaggcctgtacctgggtgagctggtgcggctggtgctggctcacttggcccggtgtggggtcctctttggtggctgcacctcccctgccctgctgagccaaggcagcatcctcctggaacacgtggctgagatggaggacccctctactggggcagcccgtgtccatgctatcctgcaggacttgggcctgagccctggggcttcggatgttgagcttgtgcagcacgtctgtgcggccgtgtgcacgcgggctgcccagctctgtgctgccgccctggccgctgttctctcctgcctccagcacagccgggagcaacaaacactccaggttgctgtggccaccggaggccgagtgtgtgagcggcaccccaggttctgcagcgtcctgcaggggacagtgatgctcctggccccggaatgcgatgtctccttaatcccctctgtggatggtggtggccggggagtggcgatggtgactgctgtggctgcccgtctggctgcccaccggcgcctgctggaggagaccctggccccattccggttgaaccatgatcaactggctgcggttcaggcacagatgcggaaggccatggccaaggggctccgaggggaggcctcctcccttcgcatgctgcccactttcgtccgggccacccctgacggcagcgagcgaggggatttcctggccctggacctcgggggcacgaacttccgtgtcctcctggtacgtgtgaccacaggcgtgcagatcaccagcgagatctactccattcccgagactgtggcccagggttctgggcagcagctctttgaccacatcgtggactgcatcgtggacttccagcagaagcagggcctgagcgggcagagcctcccactgggttttaccttctccttcccatgtaggcagcttggcctagaccagggcatcctcctgaactggaccaagggtttcaaggcatcagactgcgagggccaagatgtcgtgagtctgttgcgggaagccatcactcgcagacaggcagtggagctgaatgtggttgccattgtcaatgacacggtggggaccatgatgtcctgtggctatgaggacccccgttgcgagataggcctcattgtcggaaccggcaccaatgcctgctacatggaggagctccggaatgtggcgggcgtgcctggggactcaggccgcatgtgcatcaacatggagtggggcgcctttggggacgatggctctctggccatgctcagcacccgctttgatgcaagtgtggaccaggcgtccatcaaccccggcaagcagaggtttgaaaagatgatcagcggcatgtacctgggggagatcgtccgccacatccttttacatttaaccagccttggcgttctcttccggggccagcagatccagcgccttcagaccagggacatcttcaagaccaagttcctctctgagatcgaaagtgacagcctggccctgcggcaggtccgagccatcctagaggatctggggctacccctgacctcagatgacgccctgatggtgctagaggtgtgccaggctgtgtcccagagggctgcccagctctgtggggcgggtgtagctgccgtggtggagaagatccgggggaaccggggcctggaagagctggcagtgtctgtgggggtggatggaacgctctacaagctgcacccgcgcttctccagcctggtggcggccacagtgcgggagctggcccctcgctgtgtggtcacgttcctgcagtcagaggatgggtccggcaaaggtgcggccctggtcaccgctgttgcctgccgccttgcgcagttgactcgtgtctgaggaaacctccaggctgaggaggtctccgccgcagccttgctggagccgggtcggggtctgcctgtttcccagccaggcccagccacccaggactcctgggacatcccatgtgtgacccctctgcggccatttggccttgctccctggctttccctgagagaagtagcactcaggttagcaatatatatatataatttatttacaaaaaaaaaaaaa

SEQ ID NO: 194 - protein, 923 aa, Human
MDSIGSSGLRQGEETLSCSEEGLPGPSDSSELVQECLQQFKVTRAQLQQIQASLLGSMEQALRGQASPAPAVRMLPTYVGSTPHGTEQGDFVVLELGATGASLRVLWVTLTGIEGHRVEPRSQEFVIPQEVMLGAGQQLFDFAAHCLSEFLDAQPVNKQGLQLGFSFSFPCHQTGLDRSTLISWTKGFRCSGVEGQDVVQLLRDAIRRQGAYNIDVVAVVNDTVGTMMGCEPGVRPCEVGLVVDTGTNACYMEEARHVAVLDEDRGRVCVSVEWGSLSDDGALGPVLTTFDHTLDHESLNPGAQRFEKMIGGLYLGELVRLVLAHLARCGVLFGGCTSPALLSQGSILLEHVAEMEDPSTGAARVHAILQDLGLSPGASDVELVQHVCAAVCTRAAQLCAAALAAVLSCLQHSREQQTLQVAVATGGRVCERHPRFCSVLQGTVMLLAPECDVSLIPSVDGGGRGVAMVTAVAARLAAHRRLLEETLAPFRLNHDQLAAVQAQMRKAMAKGLRGEASSLRMLPTFVRATPDGSERGDFLALDLGGTNFRVLLVRVTTGVQITSEIYSIPETVAQGSGQQLFDHIVDCIVDFQQKQGLSGQSLPLGFTFSFPCRQLGLDQGILLNWTKGFKASDCEGQDVVSLLREAITRRQAVELNVVAIVNDTVGTMMSCGYEDPRCEIGLIVGTGTNACYMEELRNVAGVPGDSGRMCINMEWGAFGDDGSLAMLSTRFDASVDQASINPGKQRFEKMISGMYLGEIVRHILLHLTSLGVLFRGQQIQRLQTRDIFKTKFLSEIESDSLALRQVRAILEDLGLPLTSDDALMVLEVCQAVSQRAAQLCGAGVAAVVEKIRGNRGLEELAVSVGVDGTLYKLHPRFSSLVAATVRELAPRCVVTFLQSEDGSGKGAALVTAVACRLAQLTRV

SEQ ID NO: 195 - DNA, 1207 bp, Human
acagagatcagcaaacagcttttctgagagaaagaaacatctgcaaatgacatgctgtttctgcagtttctgctgctagctcttcttctcccaggtggtgacaatgcagacgcatcccaggaacacgtctccttccatgtcatccagatcttctcatttgtcaaccaatcctgggcacgaggtcagggctcaggatggctggacgagttgcagactcatggctgggacagtgaatcaggcacaataattttcctgcataactggtccaagggcaacttcagcaatgaagagttgtcagacctagagttgttatttcgtttctacctctttggattaactcgggagattcaagaccatgcaagtcaagattactcgaaatatccctttgaagtacaggtgaaagcgggctgtgagctgcattctggaaagagcccagaaggcttctttcaggtagctttcaacggattagatttactgagtttccagaatacaacatgggtgccatctccaggctgtggaagtttggcccaaagtgtctgtcatctactcaatcatcagtatgaaggcgtcacagaaacagtgtataatctcataagaagcacttgcccccgatttctcttgggtctcctggatgcagggaagatgtatgtacacaggcaagtgaggccagaagcctggctgtccagtcgccccagccttgggtctggccagctgttgctggtttgtcatgcctccggcttctacccaaagcctgtttgggtgacatggatgcggaatgaacaggagcaactgggcactaaacatggtgatattcttcctaatgctgatgggacatggtatcttcaggtgatcctggaggtggcatctgaggagcctgctggcctgtcttgtcgagtgagacacagcagtctaggaggccaggacatcatcctctactggggacaccactcttccatgaattggattgccttggtagtgatagtgcccttggtgattctaatagtccttgtgttatggtttaagaagcactgctcatatcaggacatcctgtgagactcttccccctgactcccccattgtgttaagaacccagcaacccaggagcctagtacaatatagtgatgccatcccgtcgactctccatttaaattgtttctctttctgcataataaacatttgttaataaaaaccaaaaaaaaaaaaaaaa

SEQ ID NO: 196 - protein, 333 aa, Human
MLFLQFLLLALLLPGGDNADASQEHVSFHVIQIFSFVNQSWARGQGSGWLDELQTHGWDSESGTIIFLHNWSKGNFSNEELSDLELLFRFYLFGLTREIQDHASQDYSKYPFEVQVKAGCELHSGKSPEGFFQVAFNGLDLLSFQNTTWVPSPGCGSLAQSVCHLLNHQYEGVTETVYNLIRSTCPRFLLGLLDAGKMYVHRQVRPEAWLSSRPSLGSGQLLLVCHASGFYPKPVWVTWMRNEQEQLGTKHGDILPNADGTWYLQVILEVASEEPAGLSCRVRHSSLGGQDIILYWGHHSSMNWIALVVIVPLVILIVLVLWFKKHCSYQDIL

SEQ ID NO: 197 - DNA, 5855 bp, Human
agttgcctgcgcgccctcgccggaccggcggctccctagttgcgccccgaccaggccctgcccttgctgccggctcgcgcgcgtccgcgccccctccattcctgggcgcatcccagctctgccccaactcgggagtccaggcccgggcgccagtgcccgcttcagctccggttcactgcgcccgccggacgcgcgccggaggactccgcagccctgctcctgaccgtccccccaggcttaacccggtcgctccgctcggattcctcggctgcgctcgctcgggtggcgacttcctccccgcgccccctccccctcgccatgaagaagtccattggaatattaagcccaggagttgctttggggatggctggaagtgcaatgtcttccaagttcttcctagtggctttggccatatttttctccttcgcccaggttgtaattgaagccaattcttggtggtcgctaggtatgaataaccctgttcagatgtcagaagtatatattataggagcacagcctctctgcagccaactggcaggactttctcaaggacagaagaaactgtgccacttgtatcaggaccacatgcagtacatcggagaaggcgcgaagacaggcatcaaagaatgccagtatcaattccgacatcgaaggtggaactgcagcactgtggataacacctctgtttttggcagggtgatgcagataggcagccgcgagacggccttcacatacgcggtgagcgcagcaggggtggtgaacgccatgagccgggcgtgccgcgagggcgagctgtccacctgcggctgcagccgcgccgcgcgccccaaggacctgccgcgggactggctctggggcggctgcggcgacaacatcgactatggctaccgctttgccaaggagttcgtggacgcccgcgagcgggagcgcatccacgccaagggctcctacgagagtgctcgcatcctcatgaacctgcacaacaacgaggccggccgcaggacggtgtacaacctggctgatgtggcctgcaagtgccatggggtgtccggctcatgtagcctgaagacatgctggctgcagctggcagacttccgcaaggtgggtgatgccctgaaggagaagtacgacagcgcggcggccatgcggctcaacagccggggcaagttggtacaggtcaacagccgcttcaactcgcccaccacacaagacctggtctacatcgaccccagccctgactactgcgtgcgcaatgagagcaccggctcgctgggcacgcagggccgcctgtgcaacaagacgtcggagggcatggatggctgcgagctcatgtgctgcggccgtggctacgaccagttcaagaccgtgcagacggagcgctgccactgcaagttccactggtgctgctacgtcaagtgcaagaagtgcacggagatcgtggaccagtttgtgtgcaagtagtgggtgccacccagcactcagccccgctcccaggacccgcttatttatagaaagtacagtgattctggtttttggtttttagaaatattttttatttttccccaagaattgcaaccggaaccattttttttcctgttaccatctaagaactctgtggtttattattaatattataattattatttggcaataatgggggtgggaaccaagaaaaatatttattttgtggatctttgaaaaggtaatacaagacttcttttgatagtatagaatgaaggggaaataacacataccctaacttagctgtgtggacatggtacacatccagaaggtaaagaaatacattttctttttctcaaatatgccatcatatgggatgggtaggttccagttgaaagagggtggtagaaatctattcacaattcagcttctatgaccaaaatgagttgtaaattctctggtgcaagataaaaggtcttgggaaaacaaaacaaaacaaaacaaacctcccttccccagcagggctgctagcttgctttctgcattttcaaaatgataatttacaatggaaggacaagaatgtcatattctcaaggaaaaaaggtatatcacatgtctcattctcctcaaatattccatttgcagacagaccgtcatattctaatagctcatgaaatttgggcagcagggaggaaagtccccagaaattaaaaaatttaaaactcttatgtcaagatgttgatttgaagctgttataagaattaggattccagattgtaaaaagatccccaaatgattctggacactagatttttttgtttggggaggttggcttgaacataaatgaaaatatcctgttattttcttagggatacttggttagtaaattataatagtaaaaataatacatgaatcccattcacaggttctcagcccaagcaacaaggtaattgcgtgccattcagcactgcaccagagcagacaacctatttgaggaaaaacagtgaaatccaccttcctcttcacactgagccctctctgattcctccgtgttgtgatgtgatgctggccacgtttccaaacggcagctccactgggtcccctttggttgtaggacaggaaatgaaacattaggagctctgcttggaaaacagttcactacttagggatttttgtttcctaaaacttttattttgaggagcagtagttttctatgttttaatgacagaacttggctaatggaattcacagaggtgttgcagcgtatcactgttatgatcctgtgtttagattatccactcatgcttctcctattgtactgcaggtgtaccttaaaactgttcccagtgtacttgaacagttgcatttataaggggggaaatgtggtttaatggtgcctgatatctcaaagtcttttgtacataacatatatatatatatacatatatataaatataaatataaatatatctcattgcagccagtgatttagatttacagtttactctggggttatttctctgtctagagcattgttgtccttcactgcagtccagttgggattattccaaaagttttttgagtcttgagcttgggctgtggccctgctgtgatcataccttgagcacgacgaagcaaccttgtttctgaggaagcttgagttctgactcactgaaatgcgtgttgggttgaagatatcttttttcttttctgcctcacccctttgtctccaacctccatttctgttcactttgtggagagggcattacttgttcgttatagacatggacgttaagagatattcaaaactcagaagcatcagcaatgtttctcttttcttagttcattctgcagaatggaaacccatgcctattagaaatgacagtacttattaattgagtccctaaggaatattcagcccactacatagatagcttttttttttttttttttaataaggacacctctttccaaacagtgccatcaaatatgttcttatctcagacttacgttgttttaaaagtttggaaagatacacatctttcataccccccttaggcaggttggctttcatatcacctcagccaactgtggctcttaatttattgcataatgatattcacatcccctcagttgcagtgaattgtgagcaaaagatcttgaaagcaaaaagcactaattagtttaaaatgtcacttttttggtttttattatacaaaaaccatgaagtactttttttatttgctaaatcagattgttcctttttagtgactcatgtttatgaagagagttgagtttaacaatcctagcttttaaaagaaactatttaatgtaaaatattctacatgtcattcagatattatgtatatcttctagcctttattctgtacttttaatgtacatatttctgtcttgcgtgatttgtatatttcactggtttaaaaaacaaacatcgaaaggcttatgccaaatggaagatagaatataaaataaaacgttacttgtatattggtaagtggtttcaattgtccttcagataattcatgtggagatttttggagaaaccatgacggatagtttaggatgactacatgtcaaagtaataaaagagtggtgaattttaccaaaaccaagctatttggaagcttcaaaaggtttctatatgtaatggaacaaaaggggaattctcttttcctatatatgttccttacaaaaaaaaaaaaaaaagaaatcaagcagatggcttaaagctggttataggattgctcacattcttttagcattatgcatgtaacttaattgttttagagcgtgttgctgttgtaacatcccagagaagaatgaaaaggcacatgcttttatccgtgaccagatttttagtccaaaaaaatgtatttttttgtgtgtttaccactgcaactattgcacctctctatttgaatttactgtggaccatgtgtggtgtctctatgccctttgaaagcagtttttataaaaagaaagcccgggtctgcagagaatgaaaactggttggaaactaaaggttcattgtgttaagtgcaattaatacaagttattgtgcttttcaaaaatgtacacggaaatctggacagtgctgcacagattgatacattagcctttgctttttctctttccggataaccttgtaacatattgaaaccttttaaggatgccaagaatgcattattccacaaaaaaacagcagaccaacatatagagtgtttaaaatagcatttctgggcaaattcaaactcttgtggttctaggactcacatctgtttcagtttttcctcagttgtatattgaccagtgttctttattgcaaaaacatatacccgatttagcagtgtcagcgtattttttcttctcatcctggagcgtattcaagatcttcccaatacaagaaaattaataaaaaatttatatataggcagcagcaaaagagccatgttcaaaatagtcattatgggctcaaatagaaagaagacttttaagttttaatccagtttatctgttgagttctgtgagctactgacctcctgagactggcactgtgtaagttttagttgcctaccctagctcttttctcgtacaattttgccaataccaagtttcaatttgtttttacaaaacattattcaagccactagaattatcaaatatgacgctatagcagagtaaatactctgaataagagaccggtactagctaactccaagagatcgttagcagcatcagtccacaaacacttagtggcccacaatatatagagagatagaaaaggtagttataacttgaagcatgtatttaatgcaaataggcacgaaggcacaggtctaaaatactacattgtcactgtaagctatacttttaaaatatttattttttttaaagtattttctagtcttttctctctctgtggaatggtgaaagagagatgccgtgttttgaaagtaagatgatgaaatgaatttttaattcaagaaacattcagaaacataggaattaaaacttagagaaatgatctaatttccctgttcacacaaactttacactttaatctgatgattggatattttattttagtgaaacatcatcttgttagctaactttaaaaaatggatgtagaatgattaaaggttggtatgatttttttttaatgtatcagtttgaacctagaatattgaattaaaatgctgtctcagtattttaaaagcaaaaaaggaatggaggaaaattgcatcttagaccatttttatatgcagtgtacaatttgctgggctagaaatgagataaagattatttatttttgttcatatcttgtacttttctattaaaatcattttatgaaatccaaaaaaaaaaaaaaaaaa

SEQ ID NO: 198 - DNA, 2337 bp, Human
  unsure 61: unknown base
  unsure 2277: unknown base
cggaaggtgtgagccgcaaacccagcggagggcgggaagaaggaggaggcctctagggtgntcgggggactgggggccccgccggcagaggtccctcggcctcctgactgactgactgcggccgcctccggccaggacgctgggagctgcctgcgggaaggtgcggggagcggagccatggcctccggtgcgtataacccgtatatagagataattgaacaacccaggcagaggggaatgcgttttagatacaaatgtgaagggcgatcagcaggcagcattccaggggagcacagcacagacaacaaccgaacatacccttctatccagattatgaactattatggaaaaggaaaagtgagaattacattagtaacaaagaatgacccatataaacctcatcctcatgatttagttggaaaagactgcagagacggctactatgaagcagaatttggacaagaacgcagacctttgtttttccaaaatttgggtattcgatgtgtgaagaaaaaagaagtaaaagaagctattattacaagaataaaggcaggaatcaatccattcaatgtccctgaaaaacagctgaatgatattgaagattgtgacctcaatgtggtgagactgtgttttcaagtttttctccctgatgaacatggtaatttgacgactgctcttcctcctgttgtctcgaacccaatttatgacaaccgtgctccaaatactgcagaattaaggatttgtcgtgtaaacaagaattgtggaagtgtcagaggaggagatgaaatatttctactttgtgacaaagttcagaaagatgacatagaagttcgttttgtgttgaacgattgggaagcaaaaggcatcttttcacaagctgatgtacaccgtcaagtagccattgttttcaaaactccaccatattgcaaagctatcacagaacccgtaacagtaaaaatgcagttgcggagaccttctgaccaggaagttagtgaatctatggattttagatatctgccagatgaaaaagatacttacggcaataaagcaaagaaacaaaagacaactctgcttttccagaaactgtgccaggatcacgtagaaacagggtttcgccatgttgaccaggatggtcttgaactcctgacatcaggtgatccacccaccttggcctcccaaagtgctgggattacagttaattttcctgagagaccaagacctggtctcctcggttcaattggagaaggaagatacttcaaaaaagaaccaaacttgttttctcatgatgcagttgtgagagaaatgcctacaggggtttcaagtcaagcagaatcctactatccctcacctgggcccatctcaagtggattgtcacatcatgcctcaatggcacctctgccttcttcaagctggtcatcagtggcccaccccaccccacgctcaggcaatacaaacccactgagtagtttttcaacaaggacacttccttctaattcgcaaggtatcccaccattcctgagaatacctgttgggaatgatttaaatgcttctaatgcttgcatttacaacaatgccgatgacatagtcggaatggaagcgtcatccatgccatcagcagatttatatggtatttctgatcccaacatgctgtctaattgttctgtgaatatgatgacaaccagcagtgacagcatgggagagactgataatccaagacttctgagcatgaatcttgaaaacccctcatgtaattcagtgttagacccaagagacttgagacagctccatcagatgtcctcttccagtatgtcagcaggcgccaattccaatactactgtttttgtttcacaatcagatgcatttgagggatctgacttcagttgtgcagataacagcatgataaatgagtcgggaccatcaaacagtactaatccaaacagtcatggttttgttcaagatagtcagtattcaggtattggcagtatgcaaaatgagcaattgagtgactcctttccatatgaattttttcaagtataacttgcaagatttaaatccttttaaatcttgataccacctatatagatgcagcattttgtatttgtctaactggggatataatactatatttatactgtatatataatactgactgagaatataatactgtatttgagaatataaaaaacttttttcagggaagaagcatacaactttggacatagcgaatacaaaattggaagctgtcataaaaagacaactcagaggccaggcgcaggngctcacacctgtaatcctagcactttgggaggccaaggcgggtggatcacttgagaccag

SEQ ID NO: 199 - protein, 619 aa, Human
MASGAYNPYIEIIEQPRQRGMRFRYKCEGRSAGSIPGEHSTDNNRTYPSIQIMNYYGKGKVRITLVTKNDPYKPHPHDLVGKDCRDGYYEAEFGQERRPLFFQNLGIRCVKKKEVKEAIITRIKAGINPFNVPEKQLNDIEDCDLNVVRLCFQVFLPDEHGNLTTALPPVVSNPIYDNRAPNTAELRICRVNKNCGSVRGGDEIFLLCDKVQKDDIEVRFVLNDWEAKGIFSQADVHRQVAIVFKTPPYCKAITEPVTVKMQLRRPSDQEVSESMDFRYLPDEKDTYGNKAKKQKTTLLFQKLCQDHVETGFRHVDQDGLELLTSGDPPTLASQSAGITVNFPERPRPGLLGSIGEGRYFKKEPNLFSHDAVVREMPTGVSSQAESYYPSPGPISSGLSHHASMAPLPSSSWSSVAHPTPRSGNTNPLSSFSTRTLPSNSQGIPPFLRIPVGNDLNASNACIYNNADDIVGMEASSMPSADLYGISDPNMLSNCSVNMMTTSSDSMGETDNPRLLSMNLENPSCNSVLDPRDLRQLHQMSSSSMSAGANSNTTVFVSQSDAFEGSDFSCADNSMINESGPSNSTNPNSHGFVQDSQYSGIGSMQNEQLSDSFPYEFFQV

SEQ ID NO: 200 - DNA, 2761 bp, Human
agaggacgcccggtgaaggggctccagcctggcagtttctgcgtgttagcatttctagaatagagtgggtgggaactgacccaagtaaagtcccagagactcgaacactgacgcacaggaaagcctcaagtgggaggagaaatgcaaatcccctactgatgatggcgtcagcggctttctcctagggactgtgaggggcgcttctgactttggacttgagcactgcctgggacctgtgctgagagagcgctagcatgtctcagtggaatcaagtccaacagttagaaatcaagtttttggagcaggtggatcaattctatgatgacaactttcccatggaaattcggcatctgttggcccaatggattgaaaatcaagactgggaggcagcttctaacaatgaaaccatggcaacgattcttcttcaaaacttgttaatacaactggatgaacagttaggtcgtgtttccaaagagaaaaacctactcttgatacacaatctaaaaagaattaggaaggtccttcagggaaaatttcatggaaatccaatgcatgtagctgtggttatttcaaactgtttaagggaagagaggagaatattggctgcagccaacatgcctgtccaggggcctctagagaaatccttacaaagttcttcagtttcagaaagacagaggaatgtggagcacaaagtggctgccattaaaaacagtgtgcagatgacagaacaagataccaaatacttagaagatctgcaagacgaatttgactacaggtataaaacaattcagacaatggatcagagtgacaagaatagtgccatggtgaatcaggaagttttgacactgcaggaaatgcttaacagcctcgatttcaagagaaaggaggctctcagtaaaatgacccaaatcatccatgagacagacctgttaatgaacaccatgctcatagaagagctgcaagactggaagcggcggcagcaaatcgcctgcatcgggggtccactccacaatgggctcgaccagcttcagaactgctttacactattggcagaaagtcttttccaactgagaaggcaattggagaaactagaggagcaatctaccaaaatgacatatgaaggtgatcccattccaatgcaaagaactcacatgctagaaagagtcaccttcttgatctacaaccttttcaagaactcatttgtggttgagcgacagccatgtatgccaacccaccctcagaggccgttggtacttaaaaccctaattcagttcactgtaaaactaaggctactaataaaattgccagaactaaactatcaggtaaaggttaaggcatcaattgacaagaatgtttcaactctaagcaaccgaagatttgtactttgtggaactaatgtcaaagccatgtctattgaagaatcttccaatgggagtctctcagtagaatttcgacatttgcaaccaaaggaaatgaagtccagtgctggaggtaaaggaaatgagggctgtcacatggtgactgaagaacttcattccataacgtttgaaacacagatctgcctctatggcctgaccatagatttggagaccagctcattgcctgtggtgatgatttccaatgtcagtcagttacctaatgcttgggcatccatcatttggtacaacgtgtcaaccaacgattcccagaacttggttttctttaataatcctccacctgccacattgagtcaactactggaggtgatgagctggcagttttcatcgtacgttggtcgtggtcttaactcagatcaactccatatgctggcagagaagcttacagtccaatctagctacagtgatggtcacctcacctgggccaagttctgcaaggaacatttacctggtaaatcatttaccttttggacatggcttgaagcaatattggatctaattaagaaacacattcttcccctttggattgatgggtatgtcatgggctttgttagcaaagagaaggaacggctgttgctaaaggataaaatgcctggcacctttttattaagattcagtgaaagccatctcggaggaataactttcacctgggtggaccattctgaaagtggggaagtgagattccactctgtagaaccctacaataaaggccggttgtctgctctgccattcgctgacatcctgcgagactacaaagttattatggctgaaaacattcctgaaaaccctctgaagtacctatatcctgacattcccaaagacaaagccttcggtaaacactacagctctcagccttgcgaagtttcaagaccaacagaaaggggtgacaaaggttatgttccttctgtttttatccccatctcaacaatccgaagtgattcaacagagccacattctccatcagaccttcttcccatgtctccaagtgtgtatgcggtgttgagagaaaacctgagtcccacaacaattgaaactgcaatgaagtctccttattctgctgaatgacaggataaactctgacgcaccaagaaaggaagcaaatgaaaaagtttaaagactgttctttgcccaataaccacattttatttcttcagctttgtaaataccaggttctaggaaatgtttgacatctgaagctctcttcacactcccgtggcactcctcaattgggagtgttgtgactgaaatgcttgaaaccaaagcttcagataaacttgcaagataagacaactttaagaaaccagtgttaataacaatattaacag

SEQ ID NO: 201 - protein, 748 aa, Human
MSQWNQVQQLEIKFLEQVDQFYDDNFPMEIRHLLAQWIENQDWEAASNNETMATILLQNLLIQLDEQLGRVSKEKNLLLIHNLKRIRKVLQGKFHGNPMHVAVVISNCLREERRILAAANMPVQGPLEKSLQSSSVSERQRNVEHKVAAIKNSVQMTEQDTKYLEDLQDEFDYRYKTIQTMDQSDKNSAMVNQEVLTLQEMLNSLDFKRKEALSKMTQIIHETDLLMNTMLIEELQDWKRRQQIACIGGPLHNGLDQLQNCFTLLAESLFQLRRQLEKLEEQSTKMTYEGDPIPMQRTHMLERVTFLIYNLFKNSFVVERQPCMPTHPQRPLVLKTLIQFTVKLRLLIKLPELNYQVKVKASIDKNVSTLSNRRFVLCGTNVKAMSIEESSNGSLSVEFRHLQPKEMKSSAGGKGNEGCHMVTEELHSITFETQICLYGLTIDLETSSLPVVMISNVSQLPNAWASIIWYNVSTNDSQNLVFFNNPPPATLSQLLEVMSWQFSSYVGRGLNSDQLHMLAEKLTVQSSYSDGHLTWAKFCKEHLPGKSFTFWTWLEAILDLIKKHILPLWIDGYVMGFVSKEKERLLLKDKMPGTFLLRFSESHLGGITFTWVDHSESGEVRFHSVEPYNKGRLSALPFADILRDYKVIMAENIPENPLKYLYPDIPKDKAFGKHYSSQPCEVSRPTERGDKGYVPSVFIPISTIRSDSTEPHSPSDLLPMSPSVYAVLRENLSPTTIETAMKSPYSAE

SEQ ID NO: 202 - DNA, 1908 bp, Human
catttattaaggactctctgctccagcctctcactctcactctcctccgctcaaactcagctcacttgagagtctcctcccgccagctgtggaaagaactttgcgtctctccagcaatgcatctccttgcgattctgttttgtgctctctggtctgcagtgttggccgagaactcggatgattatgatctcatgtatgtgaatttggacaacgaaatagacaatggactccatcccactgaggaccccacgccgtgcgactgcggtcaggagcactcggaatgggacaagctcttcatcatgctggagaactcgcagatgagagagcgcatgctgctgcaagccacggacgacgtcctgcggggcgagctgcagaggctgcgggaggagctgggccggctcgcggaaagcctggcgaggccgtgcgcgccgggggctcccgcagaggccaggctgaccagtgctctggacgagctgctgcaggcgacccgcgacgcgggccgcaggctggcgcgtatggagggcgcggaggcgcagcgcccagaggaggcggggcgcgccctggccgcggtgctagaggagctgcggcagacgcgagccgacctgcacgcggtgcagggctgggctgcccggagctggctgccggcaggttgtgaaacagctattttattcccaatgcgttccaagaagatttttggaagcgtgcatccagtgagaccaatgaggcttgagtcttttagtgcctgcatttgggtcaaagccacagatgtattaaacaaaaccatcctgttttcctatggcacaaagaggaatccatatgaaatccagctgtatctcagctaccaatccatagtgtttgtggtgggtggagaggagaacaaactggttgctgaagccatggtttccctgggaaggtggacccacctgtgcggcacctggaattcagaggaagggctcacatccttgtgggtaaatggtgaactggcggctaccactgttgagatggccacaggtcacattgttcctgagggaggaatcctgcagattggccaagaaaagaatggctgctgtgtgggtggtggctttgatgaaacattagccttctctgggagactcacaggcttcaatatctgggatagtgttcttagcaatgaagagataagagagaccggaggagcagagtcttgtcacatccgggggaatattgttgggtggggagtcacagagatccagccacatggaggagctcagtatgtttcataaatgttgtgaaactccacttgaagccaaagaaagaaactcacacttaaaacacatgccagttgggaaggtctgaaaactcagtgcataataggaacacttgagactaatgaaagagagagttgagaccaatctttatttgtactggccaaatactgaataaacagttgaaggaaagacattggaaaaagcttttgaggataatgttactagactttatgccatggtgctttcagtttaatgctgtgtctctgtcagataaactctcaaataattaaaaaggactgtattgttgaacagagggacaattgttttacttttctttggttaattttgttttggccagagatgaattttacattggaagaataacaaaataagatttgttgtccattgttcattgttattggtatgtaccttattacaaaaaaaatgatgaaaacatatttatactacaaggtgacttaacaactataaatgtagtttatgtgttataatcgaatgtcacgtttttgagaagatagtcatataagttatattgcaaaagggatttgtattaatttaagactatttttgtaaagctctactgtaaataaaatattttataaaactaaaaaaaaaaaaaaaaaaaaaaaaaaaaaaaaaaaaa

SEQ ID NO: 203 - DNA, 1561 bp, Human
cgcacgccacccgcccgccgcctgccagagctgctcggcccgcagccagggggacagcggctggtcggaggctcgcagtgctgtcggcgagaagcagtcgggtttggagcgcttgggtcgcgttggtgcgcggtggacacgagggaccccagttcccgcgagcagctccgcgccggccctgagagactaagctgaaactgctgctcagctcccaagatggtgccacccaaattgcatgtgcttttctgcctctgcggctgcctggctgtggtttatccttttgactggcaatacataaatcctgttgcccatatgaaatcatcagcatgggtcaacaaaatacaagtactgatggctgctgcaagctttggccaaactaaaatcccccggggaaatgggccttattccgttggttgtacagacttaatgtttgatcacactaataagggcaccttcttgcgtttatattatccatcccaagataatgatcgccttgacaccctttggatcccaaataaagaatatttttggggtcttagcaaatttcttggaacacactggcttatgggcaacattttgaggttactctttggttcaatgacaactcctgcaaactggaattcccctctgaggcctggtgaaaaatatccacttgttgttttttctcatggtcttggggcattcaggacactttattctgctattggcattgacctggcatctcatgggtttatagttgctgctgtagaacacagagatagatctgcatctgcaacttactatttcaaggaccaatctgctgcagaaataggggacaagtcttggctctaccttagaaccctgaaacaagaggaggagacacatatacgaaatgagcaggtacggcaaagagcaaaagaatgttcccaagctctcagtctgattcttgacattgatcatggaaagccagtgaagaatgcattagatttaaagtttgatatggaacaactgaaggactctattgatagggaaaaaatagcagtaattggacattcttttggtggagcaacggttattcagactcttagtgaagatcagagattcagatgtggtattgccctggatgcatggatgtttccactgggtgatgaagtatattccagaattcctcagcccctcttttttatcaactctgaatatttccaatatcctgctaatatcataaaaatgaaaaaatgctactcacctgataaagaaagaaagatgattacaatcaggggttcagtccaccagaattttgctgacttcacttttgcaactggcaaaataattggacacatgctcaaattaaagggagacatagattcaaatgcagctattgatcttagcaacaaagcttcattagcattcttacaaaagcatttaggacttcataaagattttgatcagtgggactgcttgattgaaggagatgatgagaatcttattccagggaccaacattaacacaaccaatcaacacatcatgttacagaactcttcaggaatagagaaatacaattaggattaaaataggtttttta

SEQ ID NO: 204 - DNA, 1314 bp, Human
cggctgtgttgcgcagtcttcatgggttcccgacgaggaggtctctgtggctgcggcggcggctgctaactgcgccacctgctgcagcctgtccccgccgctctgaagcggccgcgtcgaagccgaaatgccgccaccccggaccggccgaggccttctctggctgggtctggttctgagctccgtctgcgtcgccctcggatccgaaacgcaggccaactcgaccacagatgctctgaacgttcttctcatcatcgtggatgacctgcgcccctccctgggctgttatggggataagctggtgaggtccccaaatattgaccaactggcatcccacagcctcctcttccagaatgcctttgcgcagcaagcagtgtgcgccccgagccgcgtttctttcctcactggcaggagacctgacaccacccgcctgtacgacttcaactcctactggagggtgcacgctggaaacttctccaccatcccccagtacttcaaggagaatggctatgtgaccatgtcggtgggaaaagtctttcaccctgggatatcttctaaccataccgatgattctccgtatagctggtcttttccaccttatcatccttcctctgagaagtatgaaaacactaagacatgtcgagggccagatggagaactccatgccaacctgctttgccctgtggatgtgctggatgttcccgagggcaccttgcctgacaaacagagcactgagcaagccatacagttgttggaaaagatgaaaacgtcagccagtcctttcttcctggccgttgggtatcataagccacacatccccttcagataccccaaggaatttcagaagttgtatcccttggagaacatcaccctggcccccgatcccgaggtccctgatggcctaccccctgtggcctacaacccctggatggacatcaggcaacgggaagacgtccaagccttaaacatcagtgtgccgtatggtccaattcctgtggactttcagcggaaaatccgccagagctactttgcctctgtgtcatatttggatacacaggtcggccgcctcttgagtgctttggacgatcttcagctggccaacagcaccatcattgcatttacctcggatcatggtttcctcatgaggacaaatacctgattttgaataaagcagcattcagttgaaataaccctttctgtggtaattccaagtgaatatttttcttctaggtgatgagtttctacttcctctggtttttacaacaggaaatgaaatggtatctaaaataaacaagctgtggtatgatgataatt

SEQ ID NO: 205 - protein, 343 aa, Human
MPPPRTGRGLLWLGLVLSSVCVALGSETQANSTTDALNVLLIIVDDLRPSLGCYGDKLVRSPNIDQLASHSLLFQNAFAQQAVCAPSRVSFLTGRRPDTTRLYDFNSYWRVHAGNFSTIPQYFKENGYVTMSVGKVFHPGISSNHTDDSPYSWSFPPYHPSSEKYENTKTCRGPDGELHANLLCPVDVLDVPEGTLPDKQSTEQAIQLLEKMKTSASPFFLAVGYHKPHIPFRYPKEFQKLYPLENITLAPDPEVPDGLPPVAYNPWMDIRQREDVQALNISVPYGPIPVDFQRKIRQSYFASVSYLDTQVGRLLSALDDLQLANSTIIAFTSDHGFLMRTNT

SEQ ID NO: 206 - DNA, 1932 bp, Human
gcatcccctgcgcgaagctgggtgccccggagagtctgaccaccatgccacctcctcgcctcctcttcttcctcctcttcctcacccccatggaagtcaggcccgaggaacctctagtggtgaaggtggaagagggagataacgctgtgctgcagtgcctcaaggggacctcagatggccccactcagcagctgacctggtctcgggagtccccgcttaaacccttcttaaaactcagcctggggctgccaggcctgggaatccacatgaggcccctggccatctggcttttcatcttcaacgtctctcaacagatggggggcttctacctgtgccagccggggcccccctctgagaaggcctggcagcctggctggacagtcaatgtggagggcagcggggagctgttccggtggaatgtttcggacctaggtggcctgggctgtggcctgaagaacaggtcctcagagggccccagctccccttccgggaagctcatgagccccaagctgtatgtgtgggccaaagaccgccctgagatctgggagggagagcctccgtgtgtcccaccgagggacagcctgaaccagagcctcagccaggacctcaccatggcccctggctccacactctggctgtcctgtggggtaccccctgactctgtgtccaggggccccctctcctggacccatgtgcaccccaaggggcctaagtcattgctgagcctagagctgaaggacgatcgcccggccagagatatgtgggtaatggagacgggtctgttgttgccccgggccacagctcaagacgctggaaagtattattgtcaccgtggcaacctgaccatgtcattccacctggagatcactgctcggccagtactatggcactggctgctgaggactggtggctggaaggtctcagctgtgactttggcttatctgatcttctgcctgtgttcccttgtgggcattcttcatcttcaaagagccctggtcctgaggaggaaaagaaagcgaatgactgaccccaccaggagattcttcaaagtgacgcctcccccaggaagcgggccccagaaccagtacgggaacgtgctgtctctccccacacccacctcaggcctcggacgcgcccagcgttgggccgcaggcctggggggcactgccccgtcttatggaaacccgagcagcgacgtccaggcggatggagccttggggtcccggagcccgccgggagtgggcccagaagaagaggaaggggagggctatgaggaacctgacagtgaggaggactccgagttctatgagaacgactccaaccttgggcaggaccagctctcccaggatggcagcggctacgagaaccctgaggatgagcccctgggtcctgaggatgaagactccttctccaacgctgagtcttatgagaacgaggatgaagagctgacccagccggtcgccaggacaatggacttcctgagccctcatgggtcagcctgggaccccagccgggaagcaacctccctggggtcccagtcctatgaggatatgagaggaatcctgtatgcagccccccagctccgctccattcggggccagcctggacccaatcatgaggaagatgcagactcttatgagaacatggataatcccgatgggccagacccagcctggggaggagggggccgcatgggcacctggagcaccaggtgatcctcaggtggccagcctggatctcctcaagtccccaagattcacacctgactctgaaatctgaagacctcgagcagatgatgccaacctctggagcaatgttgcttaggatgtgtgcatgtgtgtaagtgtgtgtgtgtgtgtgtgtgtgtatacatgccagtgacacttccagtcccctttgtattccttaaataaactcaatgagctcttccaa

SEQ ID NO: 207 - DNA, 1019 bp, Human
ttcctttcaaatacacaccccaacccgccccggcatacacagaaatggggactgcgagcagaagcaacatcgctcgccatctgcaaaccaatctcattctattttgtgtcggtgctgtgggcgcctgtactctctctgtcacacaaccgtggtacctagaagtggactacactcatgaggccgtcaccataaagtgtaccttctccgcaaccggatgcccttctgagcaaccaacatgcctgtggtttcgctacggtgctcaccagcctgagaacctgtgcttggacgggtgcaaaagtgaggcagacaagttcacagtgagggaggccctcaaagaaaaccaagtttccctcactgtaaacagagtgacttcaaatgacagtgcaatttacatctgtggaatagcattccccagtgtgccggaagcgagagctaaacagacaggaggagggaccacactggtggtaagagaaattaagctgctcagcaaggaactgcggagcttcctgacagctcttgtatcactgctctctgtctatgtgaccggtgtgtgcgtggccttcatactcctctccaaatcaaaatccaaccctctaagaaagaaagaaataaaagaagactcacaaaagaagaagagtgctcggcgtatttttcaggaaattgctcaagaactataccataagagacatgtggaaacaaatcagcaatctgagaaagataacaacacttatgaaaacagaagagtactttccaactatgaaaggccatagaaacgttttaattttcaatgaagtcactgaaaatccaactccaggagctatggcagtgttaatgaacatatatcatcaggtcttaaaaaaaaaataaaggtaaactgaaaagacaactggctacaaagaaggatgtcagaatgtaaggaaactataactaatagtcattaccaaaatactaaaacccaacaaaatgcaactgaaaaataccttccaaatttgccaagaaaaaaaattctattyyaaact

SEQ ID NO: 208 - protein, 241 aa, Human
MGTASRSNIARHLQTNLILFCVGAVGACTLSVTQPWYLEVDYTHEAVTIKCTFSATGCPSEQPTCLWFRYGAHQPENLCLDGCKSEADKFTVREALKENQVSLTVNRVTSNDSAIYICGIAFPSVPEARAKQTGGGTTLVVREIKLLSKELRSFLTALVSLLSVYVTGVCVAFILLSKSKSNPLRKKEIKEDSQKKKSARRIFQEIAQELYHKRHVETNQQSEKDNNTYENRRVLSNYERP

SEQ ID NO: 209 - DNA, 2249 bp, Human
gtctacttatcaataagcagctgcctgtgcagagtgcaggctgcacctttggacagcctttaaaactgaattctcagaattttagaacaaatttttgtctagaaatgctgactttggttcattaggtagtggtaaaacaggctcccttcgaagctctccttcatcaccttcctaagtgcatgtacagggaagctctccttcatcaccttcctaagtgcatgggggaaaatacctagggctcaacagtcttgagaagtgtggaaacattttctttgtgagtgagaacagatcacctagagaaaggaaaccagattcccatcactgcttctgggtatcagatgctagcgctgcactccattttgcaatggcctcccttgctgcagcaaatgcagagttttgcttcaacctgttcagagagatggatgacaatcaaggaaatggaaatgtgttcttttcctctctgagcctcttcgctgccctggccctggtccgcttgggcgctcaagatgactccctctctcagattgataagttgcttcatgttaacactgcctcaggatatggaaactcttctaatagtcagtcagggctccagtctcaactgaaaagagttttttctgatataaatgcatcccacaaggattatgatctcagcattgtgaatgggctttttgctgaaaaagtgtatggctttcataaggactacattgagtgtgccgaaaaattatacgatgccaaagtggagcgagttgactttacgaatcatttagaagacactagacgtaatattaataagtgggttgaaaatgaaacacatggcaaaatcaagaacgtgattggtgaaggtggcataagctcatctgctgtaatggtgctggtgaatgctgtgtacttcaaaggcaagtggcaatcagccttcaccaagagcgaaaccataaattgccatttcaaatctcccaagtgctctgggaaggcagtcgccatgatgcatcaggaacggaagttcaatttgtctgttattgaggacccatcaatgaagattcttgagctcagatacaatggtggcataaacatgtacgttctgctgcctgagaatgacctctctgaaattgaaaacaaactgacctttcagaatctaatggaatggaccaatccaaggcgaatgacctctaagtatgttgaggtattttttcctcagttcaagatagagaagaattatgaaatgaaacaatatttgagagccctagggctgaaagatatctttgatgaatccaaagcagatctctctgggattgcttcggggggtcgtctgtatatatcaaggatgatgcacaaatcttacatagaggtcactgaggagggcaccgaggctactgctgccacaggaagtaatattgtagaaaagcaactccctcagtccacgctgtttagagctgaccacccattcctatttgttatcaggaaggatgacatcatcttattcagtggcaaagtttcttgcccttgaaaatccaattggtttctgttatagcagtccccacaacatcaaagraccaccacaagtcaatagatytgrgtttaattggaaaaatgtggtgtttcctttgagtttatttcttcctaacattggtcagcagatgacactggtgacttgacccttcctagacacctggttgattgtcctgatccctgctcttagcattctaccaccatgtgtctcacccatttctaatttcattgtctttcttcccacgctcatttctatcattctcccccatgacccgtctggaaattatggagrgtgctcaactggtaaggagaacgtagaagtagccctagggatcctttttgaaactctacagttatcgcagatattctagcttcattgtaagcaatctaggaaataagccctgctgctttctagaaataagtgtgaaggataaattttctttgttgacctatgaagattttagagtttaccttcatatgtttgattttaaatcagtgtataatctagatggtaaaaaatgtgaaattgggattagggacctaccaaaatatttcattaatgctttcaattgacaaattttggcctttctttgataagacaatatgtacatgttttttcaaatattaaagatcttttaactgttggcagttgttatctacagaatcatatttcatatgctgtgtagtttataagtttttcctctatttatcagaataaagaaatacaacatacctgtaaa

SEQ ID NO: 210 - protein, 380 aa, Human
MASLAAANAEFCFNLFREMDDNQGNGNVFFSSLSLFAALALVRLGAQDDSLSQIDKLLHVNTASGYGNSSNSQSGLQSQLKRVFSDINASHKDYDLSIVNGLFAEKVYGFHKDYIECAEKLYDAKVERVDFTNHLEDTRRNINKWVENETHGKIKNVIGEGGISSSAVMVLVNAVYFKGKWQSAFTKSETINCHFKSPKCSGKAVAMMHQERKFNLSVIEDPSMKILELRYNGGINMYVLLPENDLSEIENKLTFQNLMEWTNPRRMTSKYVEVFFPQFKIEKNYEMKQYLRALGLKDIFDESKADLSGIASGGRLYISRMMHKSYIEVTEEGTEATAATGSNIVEKQLPQSTLFRADHPFLFVIRKDDIILFSGKVSCP

SEQ ID NO: 211 - DNA, 1566 bp, Human
gagtcagcccccgggggaggccatgaacgccacggggaccccggtggcccccgagtcctgccaacagctggcggccggcgggcacagccggctcattgttctgcactacaaccactcgggccggctggccgggcgcggggggccggaggatggcggcctgggggccctgcgggggctgtcggtggccgccagctgcctggtggtgctggagaacttgctggtgctggcggccatcaccagccacatgcggtcgcgacgctgggtctactattgcctggtgaacatcacgctgagtgacctgctcacgggcgcggcctacctggccaacgtgctgctgtcgggggcccgcaccttccgtctggcgcccgcccagtggttcctacgggagggcctgctcttcaccgccctggccgcctccaccttcagcctgctcttcactgcaggggagcgctttgccaccatggtgcggccggtggccgagagcggggccaccaagaccagccgcgtctacggcttcatcggcctctgctggctgctggccgcgctgctggggatgctgcctttgctgggctggaactgcctgtgcgcctttgaccgctgctccagccttctgcccctctactccaagcgctacatcctcttctgcctggtgatcttcgccggcgtcctggccaccatcatgggcctctatggggccatcttccgcctggtgcaggccagcgggcagaaggccccacgcccagcggcccgccgcaaggcccgccgcctgctgaagacggtgctgatgatcctgctggccttcctggtgtgctggggcccactcttcgggctgctgctggccgacgtctttggctccaacctctgggcccaggagtacctgcggggcatggactggatcctggccctggccgtcctcaactcggcggtcaaccccatcatctactccttccgcagcagggaggtgtgcagagccgtgctcagcttcctctgctgcgggtgtctccggctgggcatgcgagggcccggggactgcctggcccgggccgtcgaggctcactccggagcttccaccaccgacagctctctgaggccaagggacagctttcgcggctcccgctcgctcagctttcggatgcgggagcccctgtccagcatctccagcgtgcggagcatctgaagttgcagtcttgcgtgtggatggtgcagccaccgggtgcgtgccaggcaggccctcctggggtacaggaagctgtgtgcacgcagcctcgcctgtatggggagcagggaacgggacaggcccccatggtcttcccggtggcctctcggggcttctgacgccaaatgggcttcccatggtcaccctggacaaggaggtaaccaccccacctccccgtaggagcagagagcaccctggtgtgggggcgagtggttccccacaaccccgcttctgtgtgattctggggaagtcccggcccctctctgggcctcagtagggctcccaggctgcaaggggtggactgtgggatgcatgccctggcaacattgaagttcgatcatggtaaaaaa

SEQ ID NO: 212 - protein, 384 aa, Human
MNATGTPVAPESCQQLAAGGHSRLIVLHYNHSGRLAGRGGPEDGGLGALRGLSVAASCLVVLENLLVLAAITSHMRSRRWVYYCLVNITLSDLLTGAAYLANVLLSGARTFRLAPAQWFLREGLLFTALAASTFSLLFTAGERFATMVRPVAESGATKTSRVYGFIGLCWLLAALLGMLPLLGWNCLCAFDRCSSLLPLYSKRYILFCLVIFAGVLATIMGLYGAIFRLVQASGQKAPRPAARRKARRLLKTVLMILLAFLVCWGPLFGLLLADVFGSNLWAQEYLRGMDWILALAVLNSAVNPIIYSFRSREVCRAVLSFLCCGCLRLGMRGPGDCLARAVEAHSGASTTDSSLRPRDSFRGSRSLSFRMREPLSSISSVRSI

SEQ ID NO: 213 - DNA, 5121 bp, Human
gcgaggaggaaacggtgccggagcgcgcagggcttgctgccgccaccgccgctgcacaggctgccggagcgagcctgccgcgcgccgccctccccgctctccttcctgggcgagctgcggggatggggcggccgcgggagcccgagcgcgcgcaggaaccgccgccgccgccgcccgcgtctccgttgccgcgcgcctgagccgccgtcgccgccgcgcgccctgcccgggggcggcccccccagccccatggaggtctcccggaggaaggcgccgccgcgccccccgcgccccgcagcgccactgcccctgctcgcctatctgctggcactggcggctcccggccggggcgcggacgagcccgtgtggcggtcggagcaagccatcggagccatcgcggcgagccaggaggacggcgtgtttgtggcgagcggcagctgcctggaccagctggactacagcctggagcacagcctctcgcgcctgtaccgggaccaagcgggcaactgcacagagccggtctcgctggcgccccccgcgcggccccggcccgggagcagcttcagcaagctgctgctgccctaccgcgagggggcggccggcctcggggggctgctgctcaccggctggaccttcgaccggggcgcctgcgaggtgcggcccctgggcaacctgagccgcaactccctgcgcaacggcaccgaggtggtgtcgtgccacccgcagggctcgacggccggcgtggtgtaccgcgcgggccggaacaaccgctggtacctggcggtggccgccacctacgtgctgcctgagccggagacggcgagccgctgcaaccccgcggcatccgaccacgacacggccatcgcgctcaaggacacggaggggcgcagcctggccacgcaggagctggggcgcctcaagctgtgcgagggcgcgggcagcctgcacttcgtggacgcctttctctggaacggcagcatctacttcccctactacccctacaactatacgagcggcgctgccaccggctggcccagcatggcgcgcatcgcgcagagcaccgaggtgctgttccagggccaggcatccctcgactgcggccacggccaccccgacggccgccgcctgctcctctcctccagcctagtggaggccctggacgtctgggcgggagtgttcagcgcggccgctggagagggccaggagcggcgctcccccaccaccacggcgctctgcctcttcagaatgagtgagatccaggcgcgcgccaagagggtcagctgggacttcaagacggccgagagccactgcaaagaaggggatcaacctgaaagagtccaaccaatcgcatcatctaccttgatccattccgacctgacatccgtttatggcaccgtggtaatgaacaggactgttttattcttggggactggagatggccagttacttaaggttattcttggtgagaatttgacttcaaattgtccagaggttatctatgaaattaaagaagagacacctgttttctacaaactcgttcctgatcctgtgaagaatatctacatttatctaacagctgggaaagaggtgaggagaattcgtgttgcaaactgcaataaacataaatcctgttcggagtgtttaacagccacagaccctcactgcggttggtgccattcgctacaaaggtgcacttttcaaggagattgtgtacattcagagaacttagaaaactggctggatatttcgtctggagcaaaaaagtgccctaaaattcagataattcgaagcagtaaagaaaagactacagtgactatggtgggaagcttctctccaagacactcaaagtgcatggtgaagaatgtggactctagcagggagctctgccagaataaaagtcagcccaaccggacctgcacctgtagcatcccaaccagagcaacctacaaagatgtttcagttgtcaacgtgatgttctccttcggttcttggaatttatcagacagattcaactttaccaactgctcatcattaaaagaatgcccagcatgcgtagaaactggctgcgcgtggtgtaaaagtgcaagaaggtgtatccaccccttcacagcttgcgacccttctgattatgagagaaaccaggaacagtgtccagtggctgtcgagaagacatcaggaggaggaagacccaaggagaacaaggggaacagaaccaaccaggctttacaggtcttctacattaagtccattgagccacagaaagtatcgacattagggaaaagcaacgtgatagtaacgggagcaaactttacccgggcatcgaacatcacaatgatcctgaaaggaaccagtacctgtgataaggatgtgatacaggttagccatgtgctaaatgacacccacatgaaattctctcttccatcaagccggaaagaaatgaaggatgtgtgtatccagtttgatggtgggaactgctcttctgtgggatccttatcctacattgctctgccacattgttcccttatatttcctgctaccacctggatcagtggtggtcaaaatataaccatgatgggcagaaattttgatgtaattgacaacttaatcatttcacatgaattaaaaggaaacataaatgtctctgaatattgtgtggcgacttactgcgggtttttagcccccagtttaaagagttcaaaagtgcgcacgaatgtcactgtgaagctgagagtacaagacacctacttggattgtggaaccctgcagtatcgggaggaccccagattcacggggtatcgggtggaatccgaggtggacacagaactggaagtgaaaattcaaaaagaaaatgacaacttcaatatttccaaaaaagacattgaaattactctcttccatggggaaaatgggcaattaaattgcagttttgaaaatattactagaaatcaagatcttaccaccatcctttgcaaaattaaaggcatcaagactgcaagcaccattgccaactcttctaagaaagttcgggtcaagctgggaaacctggagctctacgtcgagcaggagtcagttccttccacatggtattttctgattgtgctccctgtcttgctagtgattgtcatttttgcggccgtgggggtgaccaggcacaaatcgaaggagctgagtcgcaaacagagtcaacaactagaattgctggaaagcgagctccggaaagagatacgtgacggctttgctgagctgcagatggataaattggatgtggttgatagttttggaactgttcccttccttgactacaaacattttgctctgagaactttcttccctgagtcaggtggcttcacccacatcttcactgaagatatgcataacagagacgccaacgacaagaatgaaagtctcacagctttggatgccctaatctgtaataaaagctttcttgttactgtcatccacacccttgaaaagcagaagaacttttctgtgaaggacaggtgtctgtttgcctccttcctaaccattgcactgcaaaccaagctggtctacctgaccagcatcctagaggtgctgaccagggacttgatggaacagtgtagtaacatgcagccgaaactcatgctgagacgcacggagtccgtcgtcgaaaaactcctcacaaactggatgtccgtctgcctttctggatttctccgggagactgtcggagagcccttctatttgctggtgacgactctgaaccagaaaattaacaagggtcccgtggatgtaatcacttgcaaagccctgtacacacttaatgaagactggctgttgtggcaggttccggaattcagtactgtggcattaaacgtcgtctttgaaaaaatcccggaaaacgagagtgcagatgtctgtcggaatatttcagtcaatgttctcgactgtgacaccattggccaagccaaagaaaagattttccaagcattcttaagcaaaaatggctctccttatggacttcagcttaatgaaattggtcttgagcttcaaatgggcacacgacagaaagaacttctggacatcgacagttcctccgtgattcttgaagatggaatcaccaagctaaacaccattggccactatgagatatcaaatggatccactataaaagtctttaagaagatagcaaattttacttcagatgtggagtactcggatgaccactgccatttgattttaccagattcggaagcattccaagatgtgcaaggaaagagacatcgagggaagcacaagttcaaagtaaaagaaatgtatctgacaaagctgctgtcgaccaaggtggcaattcattctgtgcttgaaaaactttttagaagcatttggagtttacccaacagcagagctccatttgctataaaatacttttttgactttttggacgcccaggctgaaaacaaaaaaatcacagatcctgacgtcgtacatatttggaaaacaaacagccttcctcttcgcttctgggtaaacatcctgaagaaccctcagtttgtctttgacattaagaagacaccacatatagacggctgtttgtcagtgattgcccaggcattcatggatgcattttctctcacagagcagcaactagggaaggaagcaccaactaataagcttctctatgccaaggatatcccaacctacaaagaagaagtaaaatcttattacaaagcaatcagggatttgcctccattgtcatcctcagaaatggaagaatttttaactcaggaatctaagaaacatgaaaatgaatttaatgaagaagtggccttgacagaaatttacaaatacatcgtaaaatattttgatgagattctaaataaactagaaagagaacgagggctggaagaagctcagaaacaactcttgcatgtaaaagtcttatttgatgaaaagaagaaatgcaagtggatgtaagcactctggggcctggcttaatctggcaaagttcttcagacgacttgggagcaaaatggctgcttgagctactctgtgtcgttaatttgttgtttgcacataggttccactttgggcactgtctttttaagagaccaaggcacatgcacagcttttagaaagcaa

SEQ ID NO: 214 - protein, 1568 aa, Human
MEVSRRKAPPRPPRPAAPLPLLAYLLALAAPGRGADEPVWRSEQAIGAIAASQEDGVFVASGSCLDQLDYSLEHSLSRLYRDQAGNCTEPVSLAPPARPRPGSSFSKLLLPYREGAAGLGGLLLTGWTFDRGACEVRPLGNLSRNSLRNGTEVVSCHPQGSTAGVVYRAGRNNRWYLAVAATYVLPEPETASRCNPAASDHDTAIALKDTEGRSLATQELGRLKLCEGAGSLHFVDAFLWNGSIYFPYYPYNYTSGAATGWPSMARIAQSTEVLFQGQASLDCGHGHPDGRRLLLSSSLVEALDVWAGVFSAAAGEGQERRSPTTTALCLFRMSEIQARAKRVSWDFKTAESHCKEGDQPERVQPIASSTLIHSDLTSVYGTVVMNRTVLFLGTGDGQLLKVILGENLTSNCPEVIYEIKEETPVFYKLVPDPVKNIYIYLTAGKEVRRIRVANCNKHKSCSECLTATDPHCGWCHSLQRCTFQGDCVHSENLENWLDISSGAKKCPKIQIIRSSKEKTTVTMVGSFSPRHSKCMVKNVDSSRELCQNKSQPNRTCTCSIPTRATYKDVSVVNVMFSFGSWNLSDRFNFTNCSSLKECPACVETGCAWCKSARRCIHPFTACDPSDYERNQEQCPVAVEKTSGGGRPKENKGNRTNQALQVFYIKSIEPQKVSTLGKSNVIVTGANFTRASNITMILKGTSTCDKDVIQVSHVLNDTHMKFSLPSSRKEMKDVCIQFDGGNCSSVGSLSYIALPHCSLIFPATTWISGGQNITMMGRNFDVIDNLIISHELKGNINVSEYCVATYCGFLAPSLKSSKVRTNVTVKLRVQDTYLDCGTLQYREDPRFTGYRVESEVDTELEVKIQKENDNFNISKKDIEITLFHGENGQLNCSFENITRNQDLTTILCKIKGIKTASTIANSSKKVRVKLGNLELYVEQESVPSTWYFLIVLPVLLVIVIFAAVGVTRHKSKELSRKQSQQLELLESELRKEIRDGFAELQMDKLDVVDSFGTVPFLDYKHFALRTFFPESGGFTHIFTEDMHNRDANDKNESLTALDALICNKSFLVTVIHTLEKQKNFSVKDRCLFASFLTIALQTKLVYLTSILEVLTRDLMEQCSNMQPKLMLRRTESVVEKLLTNWMSVCLSGFLRETVGEPFYLLVTTLNQKINKGPVDVITCKALYTLNEDWLLWQVPEFSTVALNVVFEKIPENESADVCRNISVNVLDCDTIGQAKEKIFQAFLSKNGSPYGLQLNEIGLELQMGTRQKELLDIDSSSVILEDGITKLNTIGHYEISNGSTIKVFKKIANFTSDVEYSDDHCHLILPDSEAFQDVQGKRHRGKHKFKVKEMYLTKLLSTKVAIHSVLEKLFRSIWSLPNSRAPFAIKYFFDFLDAQAENKKITDPDVVHIWKTNSLPLRFWVNILKNPQFVFDIKKTPHIDGCLSVIAQAFMDAFSLTEQQLGKEAPTNKLLYAKDIPTYKEEVKSYYKAIRDLPPLSSSEMEEFLTQESKKHENEFNEEVALTEIYKYIVKYFDEILNKLERERGLEEAQKQLLHVKVLFDEKKKCKWM

SEQ ID NO: 215 - DNA, 7909 bp, Human
ttcaagtatggcagacaaaggatgttctgcgtggggaaatgtggtgacacccatttcacaaggacagctcacatagattgagtgctcaggaaggaccagcaccatacccagtgcctgatgtgtatcatctcaattagtccttgcctcagatgcaaaaggaaaccatcgccatcatcatcaccaccatcatcatcttcctcctgtgcagatggaaaggctgaggcatagagaggtgacggagtctgcccaggactgcaagcctgctggtggcagagccaggttccaatggaatgaaggctgtcatcctcagatggcagggtaggcaggtggctagagctcacttgggagaaggggaaaggacactgactttggctagggatggagcagagcttgggctggctttccatgcacgggcagggggcgtggctcatggctacgctccagccccgggtgtggacattgaatcttccaggtctaccctaggctatgggtctggacagcactgtgatggaaagaagacactctatgtcctgcattctgtgaccaatgatgtgactgtgggaatggcgctggcatctggctgccactctgggacgggtggccagctgccatcaggccccacccaggatgggaccaccatgcgacttcttccctcgctcctcctggtcatgtccagagccccaggaggaccagcaaagcctctcgagccgatggcagctcacgttctgccttgtcagctactcctctcctgggcaatattggctgcttgctgtggctctccccggggtatgtgactgcctctgtgctgggcacctggcctgggctttccttctgggcctgggcagctgggctcagcttggacccaggcagcagccacagaggggcccatggaggtgacagagttgcttctatgatggtgaacgggcagctgtgacacggaggaggcgaccactcctcagtttccaagtgctgcggtcagggccggggccagcaaagtccctcccatattcaaagagcgggtttgggtttgtcccaggaggacatagtcaggagcccatgctgggacatgcctcctccaaagttcagcctggatccccagcctctgccaacggccccgctccttagctaacccagcttgctcctgggttccacggcggagtcagatgtttctgggcagtttcacctttgtgccttaaatgcatgttgaggactttaaggaattgtggagaaatagggctgtggcaaaggcaagtgacaactgggaacaatgatcccgcagaggctgctgaggcctgggccccaggggcgtgggttcatccttctgcctgggctttggtgggaggggcagactctgtggtctgagacacaaaaaaacccaaaacatatgtgtgtacagacacacagcagagccacacacacacttgtgcccatgcacacactcacaggaggcccgtggactccgcacagggaagaaactcctccggtcgacagtggacggcgctgcagcagggactcacccccaagccctgcctgcctcccattgcccacctggccctggcttgatgggcttatctcatgctgtggccggggacctcttgcttcctgcaaccccttgctggactggggcctgggcctctcctgggctgtgcctagggtttgtaacccagggcctgtgccggcgtgcacagagcatctctccctgggaggctcagggctgcctcctcgagctctgtgggcctgcactggccggtgagcttgtggtgtgggttttcaggctgtatccttctacctcctgagcccaggggtcccaggcgccctgcagctgtctcctcggccatcctgtggggccccgaggccttgccctcacttcagtgcctgggtgctcaggctttgcccaggtgccaggagaaggtgtgagcatgagcctattggacacacctggcgacgtataccaggtgtcccacccctgccaccatggggcctcccgatacggcaaccaccacggacctgtggggaccaatgaggaaagagagaggcaggtctgggccaggctcacagggactccggcatagcagaccctgccccagcaggcccccttgtccttcctgggtcctggtccttcatgaggaactagcccatccctggtggggctcccaccccgcttctcagtgggctctatgcttgcctcgtcggagtcacccctcaggcagtcctgggatcctctcctttagacccactgtgccttcccggcctcccgggcttctgctgggggcagaagaaatgcctccccaggtctgtctctggaggctctgagggagatgggcttgggggctgtaggaggaggcagggattccagggtgtcaggaaggcaggggtgccaggtcccacctagtgaagtaataaaccgtgggtggtgatagtgacccagtgccctcactgcccagccccgcctgtcctcagccagcactgcagggatcccaggcccagactctggaggccttcactgatcccagccaccccagaaaagctgcagcctgcaggcaccagccgggccatatgcccagtgccagctagggcccaccgcccatcctgcacacggggccgctgggcaggtgcccctcacacccccaggatgtcagtgctcacctcgagcaaagcgccccagctcggccttgggaggtggtcatgtccagggggatgatggagagctgtccaaccaagagagcgggagggagggaaggagggagggagagagatagagagagagagagagagagaggaagtgtgggccctaaggctgccttagtggaggtgcgcgtggcctgcacctcaccaagcctagccactctcgcggctctgagtggctcacaggcttgtgagggccccgtcgctgcctgctgggtccccaccagggctccctctaggaatgcgccatggctgctatgacaatttgcacagcccagtggcttaaacaccatttataccacaggtccagatgaatcctgcagggccaaggtctgggggtgctggaggccatgctccctccaggcttgcggggagaacttccctgcctcctccagtctctccatccctgagctctcggctcctcctccgtcttcagggccagggcgtagcgtctgctctctcggcctctgcctccgcttcccacctcacctggcttctgtctatgtcagtctccctctgccaacctcctagaaggacacttgtgattacattagggctcacccctttaatccaggggagcctctccacttcatgattttcagctaacttgcttctgcacagaccccctttccctataagggcacacattcactggtcccggggctaaggaccttgctccaagtccctccacccatgatgctgtgccttccagaaacctgtcctctgcagctcggtcttgaccccaagcctgctggtgacctgaacttcacagggttatccccttggactgtgtgcagcacgatgcaatttctgggcctgaatgtcatgctccctggggcaggaccttgagcctgcagcacacactaggccacctgcagtctcacaggccatgccctgggtagacagggaggtgctcaaccccagctcgggtcctctagtctgcctggctaccatgcttctcactctcctgcatctgcagaccctgcgttgccatgtgaggcaggggtggggtggggctgagggcgtggctttggtccctggctgtccggatgaagtaccagagtgacgccacagcccatcccggtgacatgctcacccccaacccccgtgtccgggaccccggtcttgtgtggtccctgatgtggagtcctcagtccttaagatacatccagaaagtcctggccatgaattggaggtgcagagtcctgcagagcctctgggctgggctggtgcccccaggagatggagggcctggtggatgccctcctccctcagagctggggcagctgcctcccaggggtgggactctgggctcagagagaggcccttgagctgcagctcagggggatgcgaggcttcgtggactgtgtcctggtccatgtggtgcacgtgtctccacctccaaggagaggctcctcagtgtgcacctcccccacatccgtcctctctgccggccccgggcgtctgagcagtcattccatgccagcacctctgcagcctgctgggcctcaggttctctgtgagggacctccccggccttcggcggaggtggagtaagctccgtcaaggcaggtggcttcgtcccttcctgtgagtgacaccagtgatgaaatggacccctccacacaggcatcctcagggcacagggccctgggggcaccttcctcctttcgtatttgttgagaaaaaaagtggcattgcgctcacaccaggatgctggagcagagctgacatgctcgggaaagggcagaggtcactgggggtgggaaggtcatccagtccagactcagcacctcgtgggctggtaaactgaggctcaaagtgctggtgccaggcctgaggcctcgcggtgacccctctctctggttcccagcacctgcctgagacctgccccaggcacccataacctggaattccctgtttccttgtccagggcctgaggaaatggctccccaggtctgtctctggatgctctgaggcagatgggcttgggggctctaggaggaggcagggactccagggtgtcaggaaggcaggggtgccgggtcccacccagtggagtaacaaactgtgggtggcgtttgggcctccccgccttccccactgggtgtgctggtgctggcgctgctgggtcagggctgcccgtgaccccagacaccactgtccatcctgtgaggctcccgtctgggcatgtcctgggtggattcctcctttctgttaagtagctacatgaggcaggggctcctggatccaaagcaaatgacaggaattccagagccaggtgcatccactcagggcagccagtgttggtggagctgcctctagcacatggaggagagtgaaagtcagcctgcccctctcacgagaaaagaacctggggatacctctcagcctccagcgttgcaagtgcaaggccagtggagttaatctgcaacgtgcacgagggcgtgtgtcagtggctgtgtgcaggagtgtgagtgagcaagagcaagagcgcatggctcctgctgtacctcaaggtgtgggctcctggtggctgctcagtgttcccaggggtgagaggcctcatgtatcctaggctgcctgagatttctgtgtgctgatcgcatcctcagtttcttgtccaccgcttcactggcaagagtcccaggctccaaggacaccctccctgcacatgattgggtgttaatggtggcctgggttgtgtcttcccctggggatgagggttgggtgtccatggtgccctgggctgtgtcctcccctagggatgagggtcgggcctccacgatgccctgggctgtgtgctcttatgggaatgagggttgggtgtccaagatgccctgggctgtgtccttccctggggatgagggttggatgtccaagatgccctgggctgtgtactcccctaggaatgagggctgggtgtccaagataccctgggctgtgtcctcccctggggatgagggttgggtgtccatggtgccctgggctgtgtcctcccctggggatgacggttgggtgtccatggtgccctgggctgtgtttccttggggatgagggttgggtgctatggcatcctgggcaggtgcttcctttctgcacaagggttgggtgaccatgatgtcctggcaatggcttccctgggttgcctcttttctgccatgtgggaagagcaggggaggtttagttggtctcagcacatcattctctcaggataagtagaagagtgtctgagctgtgaggccagtgctccagctttggaattgtcttccccaccctcacctccatcccatcaaagcccgacatgtcgtgtggcagcagcgaggtgggtgttggctgttctcttgggctgggggttagtcgtggacggggaaaggagagatgctggtcaaagggcatgaagtttctgctgatgggaggagtcagttcttttgatctgttgcacagcatggtgactatagttaacaataatgactatttcaaaattgctaaaagatgagattttaaatgttctcaccacaaaatgataagtgtgtgaggtgatggatatgccacttaccttgttttaatcatcccacaatatagacaggcattgtcactttgcattgtaccccaggaatcttcacatttgcttttttgtcaattaaaaatagagacacaaaaggagagaggggagagcaatagactcttcacggaaccgtgggcttctgcctccgggtaaaataaactgcaaaaaggattcccaggaaaccgttccctctttcagcccttggttacaggaagccggatttgggaaatctgcctggatgacattcacatgaacgggcacatacaggaaaacacggtaatgtaattagaatagtcagagaaaagtagccagaaatgacattcacatgaacgggcacatacaggagaaaacacggtaacgtaattagaatagtcagagaaaagtagccagaaatgacattcacatgaacgggcacatataggagaaaccatggtaacgtaattagaatagtcagagaaaagtagccagaaatgacattcacatgaacgggcacatacaggaaaacacggtaatgtaattagaatagtcagagaaaagtagccagaaatgacattcacatgaacgggcacatacaggagaaaacacggtaacgtaattagaatagtcagagaaaagtagccagaaatgacattcacatgaacgggcacatacaggagaaaacacggtaacgtaattagaatagtcagagaaaagtagccagaagaatttgcaacgtgcccttgtaacaccaaatttgatcagttttttaaaaaatgatcgttatgtaggtgattgagaagtaaatgtattcttttttaaggtaaaaatttggacccttatcatgcatacccccctctgtgctcttcaaatcaacatcattattaatatctgtacatttttgctcatctgagccagcacaggctgaggctgtcagaatggacaccttttggttgttgggtttctgtcagtttctggggtgaagctgcgtgattgagaacgtagctcttggctgccatctcggggattattaaggactgtgaactctatccacaagccatggcaatatctgtcccaccgaatgctccctctaacacactcttactcccgtgatgtgtgttaagggctccgatgatgctgaaaacagcacaggatgtgaaaaggcaggaacagttctgaagtcaaaggctgatgtcctgtttctctttccctctgtgaccgactcccttcccagtggtaacaagtacccacagcttggtttgaatttctgcacgctgttgtctgtgcactcgctcacacttacgcacacagcaggcatgtgggcgatgctgggtattttgtgtatgagtgggatgcacatacacacatctacatccatatcatgcccatgcatctgtaacttgcttttcccgtgtaagaacacttcttagagtttgttcaatgcatgtgtctgtgtgaatgattgaaggcatttctaacccattttaaagatggctacttaggaccatatggatgttgtactgatgtcatttgaccacgtccattgtttccatcttttgggctgttcttgtgtattttactttccatgtaacactgtgacattgagaattggtacctacaacagtctatttgctttacattaaatttgtaggctaatttgtgtaaaaaaaaaaaaaaaaa

SEQ ID NO: 216 - protein, 77 aa, Human
MGLSHAVAGDLLLPATPCWTGAWASPGLCLGFVTQGLCRRAQSISPWEAQGCLLELCGPALAGELVVWVFRLYPSTS

SEQ ID NO: 217 - DNA, 1040 bp, Human
aacacatttcatctgggcttcttaaatctaaatctttaaaatgactaagttttcttccttttctctgtttttcctaatagttggggcttatatgactcatgtgtgtttcaatatggaaattattggagggaaagaagtgtcacctcattccaggccatttatggcctccatccagtatggcggacatcacgtttgtggaggtgttctgattgatccacagtgggtgctgacagcagcccactgccaatatcggtttaccaaaggccagtctcccactgtggttttaggcgcacactctctctcaaagaatgaggcctccaaacaaacactggagatcaaaaaatttataccattctcaagagttacatcagatcctcaatcaaatgatatcatgctggttaagcttcaaacagccgcaaaactcaataaacatgtcaagatgctccacataagatccaaaacctctcttagatctggaaccaaatgcaaggttactggctggggagccaccgatccagattcattaagaccttctgacaccctgcgagaagtcactgttactgtcctaagtcgaaaactttgcaacagccaaagttactacaacggcgacccttttatcaccaaagacatggtctgtgcaggagatgccaaaggccagaaggattcctgtaagggtgactcagggggccccttgatctgtaaaggtgtcttccacgctatagtctctggaggtcatgaatgtggtgttgccacaaagcctggaatctacaccctgttaaccaagaaataccagacttggatcaaaagcaaccttgtcccgcctcatacaaattaagttacaaataattttattggatgcacttgcttcttttttcctaatatgctcgcaggttagagttgggtgtaagtaaagcagagcacatatggggtccatttttgcacttgtaagtcattttattaaggaatcaagttctttttcacttgtatcactgatgtatttctaccatgctggttttattctaaataaaatttagaagact

SEQ ID NO: 218 - protein, 264 aa, Human
MTKFSSFSLFFLIVGAYMTHVCFNMEIIGGKEVSPHSRPFMASIQYGGHHVCGGVLIDPQWVLTAAHCQYRFTKGQSPTVVLGAHSLSKNEASKQTLEIKKFIPFSRVTSDPQSNDIMLVKLQTAAKLNKHVKMLHIRSKTSLRSGTKCKVTGWGATDPDSLRPSDTLREVTVTVLSRKLCNSQSYYNGDPFITKDMVCAGDAKGQKDSCKGDSGGPLICKGVFHAIVSGGHECGVATKPGIYTLLTKKYQTWIKSNLVPPHTN

SEQ ID NO: 219 - DNA, 1769 bp, Human
ggagatgggatgtcccagatgatagggctcctgggatttcagacccaagaccagcaggactccagtcacctctaccccagctctccaggacacagcgctcccaactctgagtgacgtcccacctctggtccttgcagcacaaccaacgtgggaatcacaccctccagacctcccacagctccaccccagactgggcgccggccctgcctccatttcagctgtgacaacctcagagccgtgttggcccaagcatgacaaggacgtatgaaaacttccagtacttggagaataaggtgaaagtccaggggtttaaaaatgggccacttcctctccagtccctcctgcagcgtctctgctctgggccctgccatctcctgctgtccctgggcctcggcctcctgctgctggtcatcatctgtgtggttggattccaaaattccaaatttcagagggacctggtgaccctgagaacagattttagcaacttcacctcaaacactgtggcggagatccaggcactgacttcccagggcagcagcttggaagaaacgatagcatctctgaaagctgaggtggagggtttcaagcaggaacggcaggcaggggtatctgagctccaggaacacactacgcagaaggcacacctaggccactgtccccactgcccatctgtgtgtgtcccagttcattctgaaatgctcctgcgagtccagcagctggtgcaagacctgaagaaactgacctgccaggtggctactctcaacaacaatgcctccactgaagggacctgctgccctgtcaactgggtggagcaccaagacagctgctactggttctctcactctgggatgtcctgggccgaggctgagaagtactgccagctgaagaacgcccacctggtggtcatcaactccagggaggagcagaattttgtccagaaatatctgggctccgcatacacctggatgggcctcagtgaccctgaaggagcctggaagtgggtggatggaacagactatgcgaccggcttccagaactggaagccaggccagccagacgactggcaggggcacgggctgggtggaggcgaggactgtgctcacttccatccagacggcaggtggaatgacgacgtctgccagaggccctaccactgggtctgcgaggctggcctgggtcagaccagccaggagagtcactgagctgcctttggtgggaccacccggccacagaaatggcggtgggaggaggactcttctcacgacctcctcgcaagaccgctctgggagagaaataagcactgggagattggaagcactgctaacattttgaatttttttctctttaattttaaaaagatggtatagtgttcttaagcttttattttttttccaacttttgaaagtcaacttcatgaaggtataatttttacataataaaaatgcactcatttaaagagtagagatgactttgacaaatatgcatgcctaggtgactaccactccgatcacaatagataacattgccatcgcccccaccagtcccctcatgcctctgggcagtccaaccacttccctgtttccaggccagtgatctacttctttttcactatttattggccttgcctcttctagagcttctagaacttcatataagtgaaatcatacactctcgtgtatatacttcatataagtgaatatatactctcgtgagaacttaaaaaaaaaaaaaaaaaaaaaaaaaaaaaaaaaaaaaaaaaaaaaaaaaaa

SEQ ID NO: 220 - protein, 316 aa, Human
MTRTYENFQYLENKVKVQGFKNGPLPLQSLLQRLCSGPCHLLLSLGLGLLLLVIICVVGFQNSKFQRDLVTLRTDFSNFTSNTVAEIQALTSQGSSLEETIASLKAEVEGFKQERQAGVSELQEHTTQKAHLGHCPHCPSVCVPVHSEMLLRVQQLVQDLKKLTCQVATLNNNASTEGTCCPVNWVEHQDSCYWFSHSGMSWAEAEKYCQLKNAHLVVINSREEQNFVQKYLGSAYTWMGLSDPEGAWKWVDGTDYATGFQNWKPGQPDDWQGHGLGGGEDCAHFHPDGRWNDDVCQRPYHWVCEAGLGQTSQESH

SEQ ID NO: 221 - DNA, 2330 bp, Human
gcgccgtcagtagcaccaccgccttccaagtttccccttgtggatgcgcggccccgcggctctgctcctcccggcgcagaggggccgggagaggccacaggagcggacctggcacgggatttctgaggaacgggagaagactggcgcccgacccgctctggagggtcggtgaacgatgaagggccggcggcggcgacgccgagagtactgcaagttcgcgctgctgttggtgctgtacacgctggtgctgttgctcgtcccctccgtattggacggcggccgcgacggggacaagggcgccgagcactgccccggcctgcagcgcagcctgggagtgtggagcctggaggcggcggcggccggcgaacgcgagcagggagcggaggcgcgggccgccgaggaagggggcgcgaaccagtctcctcggttcccaagcaacctcagcggcgctgtcggggaggcagtgtctcgcgagaagcagcacatctacgtgcatgccacctggcgcaccggctcgtccttcctgggcgaactctttaaccagcacccggacgttttctacttgtatgagcccatgtggcatctatggcaggcgctgtatccgggcgacgccgagagcttgcagggcgcgctgcgcgacatgctgcgttcgctcttccgctgcgacttctccgtgctgcggctgtacgcgccgccgggggaccccgctgcgcgcgccccggacacggccaatcttaccacggccgccctcttccgctggcggactaacaaggtcatctgctcgccgccactgtgtcctggcgcaccccgtgcccgggccgaggtgggcctcgtcgaggacaccgcctgcgagcgcagctgcccacccgtggcgatacgcgccctggaggccgagtgccgaaagtacccggtggtggtcatcaaggacgtgcgcctgctcgatctgggcgtgctggtgcccctgttgcgtgatccaggcctcaacctgaaggtggtgcagcttttccgcgacccgagggcggtgcacaactcgcgcctcaagtctaggcagggactgctgcgcgagagcatccaggtgctgcgcacccgccagaggggcgaccgcttccaccgtgtgctgctggcgcacggcgtgggtgctcgccccgggggccagtctcgcgcgctgcccgccgcgccgcgcgccgatttcttcctgaccggtgcgctcgaggtgatctgcgaagcctggctgcgcgatctgcttttcgcgcgcggcgcgcccgcctggctgcggcgccgctacctgaggctgcgctatgaggacctggtgcggcagccacgcgcccagctgcgccgcctgctgcgcttctccgggctacgcgcgctcgcagcgctcgatgccttcgcgctcaacatgactcgcggcgcggcctacggcgccgaccggcccttccacctgtcagcgcgcgacgcccgggaggcggtgcacgcctggcgcgagcgcctgagccgagagcaggtgcgccaggtggaggccgcctgcgctccagccatgcgtctgctcgcctaccctcgcagcggagaggagggcgacgcggagcagcccagggaaggggagacgccgctggagatggatgccgacggcgccacgtagcctcccatccctgtccccggcacggatccgggtcagtcaccacgaacaggggcactcggcatgctgccccagcactggagaagcagcgctgtgggggcaatctgtcacactctcagagtctgggacttgacttgctaccaacaactgctgtgcaattctgctgagcaggaatatcatgagctgttcaataatgacggacgcattggttgagatgaagtttccagtaaggaagtgacagtgcaatgtggatatttatggctgtaaaataggaagagctttagttcccaggctgaacctgccactgctggagccatttcaacaaggcatcctcacaacaaagaagagatgtgatttggtaccatttcacaccagcaggtgtctggacgaaaacatcaatgtgaataagggccaagtgcagtcctgtcttgattaaattacttaataatattattaaataataataggtctgggcagtattgtttttaacctgactcatccagctgtccttcaaatagctccgtctccctctacccagaactgatttttaaaaagaagtaatttttctccctgggctgggaaaaccctaatgaactgaaacacacttttactttaaaatttttctgtctggcgtttttgtaatcatactattaaatgactctggagtcatgttaatgaaaaaaaaaaaaaaaaaaaa

SEQ ID NO: 222 - protein, 486 aa, Human
MKGRRRRRREYCKFALLLVLYTLVLLLVPSVLDGGRDGDKGAEHCPGLQRSLGVWSLEAAAAGEREQGAEARAAEEGGANQSPRFPSNLSGAVGEAVSREKQHIYVHATWRTGSSFLGELFNQHPDVFYLYEPMWHLWQALYPGDAESLQGALRDMLRSLFRCDFSVLRLYAPPGDPAARAPDTANLTTAALFRWRTNKVICSPPLCPGAPRARAEVGLVEDTACERSCPPVAIRALEAECRKYPVVVIKDVRLLDLGVLVPLLRDPGLNLKVVQLFRDPRAVHNSRLKSRQGLLRESIQVLRTRQRGDRFHRVLLAHGVGARPGGQSRALPAAPRADFFLTGALEVICEAWLRDLLFARGAPAWLRRRYLRLRYEDLVRQPRAQLRRLLRFSGLRALAALDAFALNMTRGAAYGADRPFHLSARDAREAVHAWRERLSREQVRQVEAACAPAMRLLAYPRSGEEGDAEQPREGETPLEMDADGAT

SEQ ID NO: 223 - DNA, 4513 bp, Human
acacaaatttcagagaacaatttcaacattgttctgtcgaacgttatactcagtcctgaaccacattactttcctgtctacgtttcatttcctgggggcttgccaagtgataaacagacccaggcgtgtgtggtagagttcgggttttttagcacgaagtgggtggctggagtttgcttgaaaacatcaattgactttgtgatcattacagaaatgctggtgtaaggtgttcagaagacaatggagaaaaaatggaaatactgtgctgtctattacatcatccagatacattttgtcaagggagtttgggaaaaaacagtcaacacagaagaaaatgtttatgctacacttggctctgatgtcaacctgacctgccaaacacagacagtaggcttcttcgtgcagatgcaatggtccaaggtcaccaataagatagacctgattgctgtctatcatccccaatacggcttctactgtgcctatgggagaccctgtgagtcacttgtgactttcacagaaactcctgagaatgggtcaaaatggactctgcacttaaggaatatgtcttgttcagtcagtggaaggtacgagtgtatgcttgttctgtatccagagggcattcagactaaaatctacaaccttctcattcagacacacgttacagcagatgaatggaacagcaaccatacgatagaaatagagataaatcagactctggaaataccatgctttcaaaatagctcctcaaaaatttcatctgagttcacctatgcatggtcggtggaggataatggaactcaggaaacacttatctcccaaaatcacctcatcagcaattccacattacttaaagatagagtcaagcttggtacagactacagactccacctctctccagtccaaatcttcgatgatgggcggaagttctcttgccacattagagtcggtcctaacaaaatcttgaggagctccaccacagtcaaggtttttgctaaaccagaaatccctgtgattgtggaaaataactccacggatgtcttggtagagagaagatttacctgcttactaaagaatgtatttcccaaagcaaatatcacatggtttatagatggaagttttcttcatgatgaaaaagaaggaatatatattactaatgaagagagaaaaggcaaagatggatttttggaactgaagtctgttttaacaagggtacatagtaataaaccagcccaatcagacaacttgaccatttggtgtatggctctgtctccagtcccaggaaataaagtgtggaacatctcatcagaaaagatcacttttctcttaggttctgaaatttcctcaacagaccctccactgagtgttacagaatctacccttgacacccaaccttctccagccagcagtgtatctcctgcaagatatccagctacatcttcagtgacccttgtagatgtgagtgccttgaggccaaacaccactcctcaacccagcaattccagtatgactacccgaggcttcaactatccctggacctccagtgggacagataccaaaaaatcagtttcacggatacctagtgaaacatacagttcatccccctcaggtgcaggctcaacacttcatgacaatgtctttaccagcacagccagagcattttcagaagtccccacaactgccaatggatctacgaaaactaatcacgtccatatcactggtattgtggtcaataagcccaaagatggaatgtcctggccagtgattgtagcagctttactcttttgctgcatgatattgtttggtcttggagtgagaaaatggtgtcagtaccaaaaagaaataatggaaagacctccacctttcaagccaccaccacctcccatcaagtacacttgcattcaagagcccaacgaaagtgatctgccttatcatgagatggagaccctctagtctcgtgagactttgccccatggcagaactctgctggaatcctattgagaaggtagacattgtgctttattaatatagtcgctcttcagccatgcctttgctgcagctgaaatggaagtcagaagtgagtgacctgttttcccagcaactcaccctcttccatctccaaacgcctgaagcttaaccaagagtgagaggatatgtcatgttcacactcaatgcaattcgtagtggttttcttgcttatgtaagaagtacatattagtctgccatctttaaaaaaaaatacagtattttcatttaaattctctgatggagggacaacaatggtttcaactgtatgcccatgcctgatcctcttatttgaacatctatcaacattgtaaactctttgccaaaatcctggggctttgctgcattccctaagataattacaggaaaaagaaaatgtaaaagtgctaacaaggctgccaagtaatggagaagtatggttagtcttcatattgaaattctgttgcttattttcatggaaggaaacagaatactttgcacaggaaccacattttcaatcctccttcactgtcttcctaccatgttcagcccagactcctgccacatggaccaggatgaagagggatcaaagagataattagccaaaaacccagtagcctagaagatacaaaactccactggcctctaaaattatattagccaagagtggtttcatttgagtgccttcgtgtgtatgtccatcaaactggaaccaaactgttttgtaagtaaacaggcagcctaagcccaaccctactttctaattccggttattctctttttcatctggggatttacctgttcatttaatctgcctgttttgatctgttttgaaaaagataaagagcctcaaatcagaccagcactgattaattaaccctgctcctaccaatcttttttaaagcagttgaagcagaatgtataggtgtcagagaagaaacctagtcagccagacgtgctctgtattcagcaatagtttgtgaatgaataaattactaatcctccttgtcgcttgaaaccttcccacactccctgctccaggagggaaaaacagatgttgttgacagatagagtgataggcaaattctgtgtggactttagtcccaaaaggaaactttagttcacttgcagtatgcttatccttgactgcacatgagaatgccttgtgcagagttatttggagattatgtctttttcttaaacaccatggctgtcacacttcagttcaattaaatcagaatgtctgaggagtgagacacaggcatcaacactctcaaatgattcacatgttcagccaaagttgagaaccatcgagcctgtggaagttctttctcatggctcagaatcttaggtaggtgcttaactcttgtggtggccagcctccaagatgagccccagtgttcttgcctcctactattcacatctttatgtggtcccctccaatgctgaatacagatgatttgtgtaacctgaggccaggattaaggggaggcaatcaatgtacctagggaaaaaatttaaggaggtattcacactcagggtcatgcacttgcacaatgttgagaatgagtaccactctcaccattggtatagccaaaaaagcttggaagtgaccaaggctaggtcacaaaatacactgtggcttcttctttgatctctctttgaccatactgacactgggaaaagcccattcccatgccatgaagacaccaaggcagccctattgagaaatctacctgtcgtggccgggcgcagtggctcacgcctgtaatcccagcactttgggaggccgaggtgggtggatcacgaggtcaggagatcgagaccatcctggctaacacagtgaaaccccgtctctactaaaaatacaaaaaattagccgggtgtggtgtcgggcacctgtagtcccagctactcaggaggctgaggcaggagaagggtgggaacccgggaggcagagcttgcagtgagccgagattgtgccactgcacactccaatctgggtgaaagaccgagactccgcctcaaaaaaaaaaaaaaaagaaagaaagaaagaaagaaagaaatctacctgtcaaggaactaaggtattttgctaacaagcaccaacttgccagccatgtaagggagccatcttggaagcagatcctccagcctccagtcaagtcttcagataattgcaacttcagttgatcttttgaccaagacctcaagagagccagaactacccagctaagccttttactaaatttctgaacttctaacactattagataataagtgcttattgtttaacaccattaattttgagtataatttgttacatagcgacagataactatacagctcaacaactagaaaaataaactgtttacctgccttaattatttatctttagttccttattagttctcaagaaacaaatgctagcttcatatgtatggctgttgctttgcttcatgtgtatggctatttgtatttaacaagacttaatcatcagtaatttgtatac

SEQ ID NO: 224 - DNA, 822 bp, Human
gggctgctccacgcttttgccggagacagagactgacatggaacaggggaagggcctggctgtcctcatcctggctatcattcttcttcaaggtactttggcccagtcaatcaaaggaaaccacttggttaaggtgtatgactatcaagaagatggttcggtacttctgacttgtgatgcagaagccaaaaatatcacatggtttaaagatgggaagatgatcggcttcctaactgaagataaaaaaaaatggaatctgggaagtaatgccaaggaccctcgagggatgtatcagtgtaaaggatcacagaacaagtcaaaaccactccaagtgtattacagaatgtgtcagaactgcattgaactaaatgcagccaccatatctggctttctctttgctgaaatcgtcagcattttcgtccttgctgttggggtctacttcattgctggacaggatggagttcgccagtcgagagcttcagacaagcagactctgttgcccaatgaccagctctaccagcccctcaaggatcgagaagatgaccagtacagccaccttcaaggaaaccagttgaggaggaattgaactcaggactcagagtagtccaggtgttctcctcctattcagttcccagaatcaaagcaatgcattttggaaagctcctagcagagagactttcagccctaaatctagactcaaggttcccagagatgacaaatggagaagaaaggccatcagagcaaatttgggggtttctcaaataaaataaaaataaaaacaaatactgtgtttcagaagcgccacctattggggaaaattgt

SEQ ID NO: 225 - protein, 182 aa, Human
MEQGKGLAVLILAIILLQGTLAQSIKGNHLVKVYDYQEDGSVLLTCDAEAKNITWFKDGKMIGFLTEDKKKWNLGSNAKDPRGMYQCKGSQNKSKPLQVYYRMCQNCIELNAATISGFLFAEIVSIFVLAVGVYFIAGQDGVRQSRASDKQTLLPNDQLYQPLKDREDDQYSHLQGNQLRRN

SEQ ID NO: 226 - DNA, 2425 bp, Human
atgtggtggagagttctcagcttgctggcatggttccccttgcaagaggcctctctgactaaccacacagaaaccatcaccgtggaggaaggccagacgctcactctaaagtgtgtcacttctctgaggaagaactcctccctccagtggctgaccccctcagggttcaccatttttttaaatgagtatcctgctttaaaaaattccaaataccagcttcttcatcactcggccaatcagctctccatcactgtgcctaacgtaaccctgcaagatgaaggcgtgtacaagtgcttacattacagcgactctgtaagcacaaaggaagtgaaagtgattgtgctggcaactcctttcaagccaatcctggaagcttcagttatcagaaagcaaaatggagaagaacatgttgtactcatgtgctccaccatgagaagcaagccccctccgcagataacctggctacttgggaatagcatggaagtgtccggtggaacgctccatgaatttgaaactgatgggaagaaatgtaatactaccagcactctcataatccacacttatggcaaaaattcaacggtggactgcattatccgacacagaggcctgcaagggagaaaactagtagcacccttccggtttgaagatttggttactgatgaagagacagcttcagatgctctggagagaaactctctatcctctcaagacccacagcagcccaccagtactgtctcagtaacggaagattctagtacatcggagattgacaaggaagagaaagaacaaaccactcaagatcctgacttgaccaccgaagcaaatcctcagtatttaggactggcaagaaagaaaagtggcatcctgctgctcacgctggtgtccttcctcattttcatactcttcatcatagtccagctcttcatcatgaagctgaggaaagcacatgtgatatggaagagagaaaacgaagtttcagaacacacactagaaagttacagatcaaggtcaaataatgaagaaacatcatctgaagagaaaaatggccaatcttcccaccctatgcgttgcatgaactacatcacaaagttgtactcagaagcaaaaacaaagaggaaggaaaatgtacaacattcaaaattagaagaaaagcacatccaagtaccagagagtattgtgtagtgctctctgcaatggaacatgtgatttcagggttgccgcagtgtcacctcagtggaccagcctgggggaaggagcttaattgctgagacattaataatgacctcttagtgcaatgcaagatggtgtcctcggataatgatctgccccggagctagggcagcaacatgaggaccaaaccatgcacataaagcttgtagtttaaaaaagaaaagcaaaaaaataattatgcctgacactacttcagagcaggaggattctacgaagccttggggatcagggtcagtgtgagcagctaacatcctacctcaaatggaacaggattttttgatgctttgctctaatggaactgttttaaaaatttttttttctttttaatattttcttctggtcacaaaataaagaaatttgggatgcaaagtacctaaagatctctgatcctaagaagttacttctggccaggcgcggtggctcatgcctgtaatcctagcactttgggaggctgaggtaggcagatcacttgaggtcaggagttggagaccagcctggccaacatagtgaaaccccgtctctactaaaaatgcaaaaattagccaggcgtagtggtgcgcacctgtagtctcagatacttgggaggctgagggtggagaatcgcttgaacctgggaggtggagattgcagtgagtcaagatctcaccactgaactccagcctgggcgacagagggagactctgtctcaaaaaaaaagaagttacttccaagacagacttttaacatgtaaccagcacaaagcaatgtcagggaggagtgatacatgacaataaatgagtcagatgagcaagaaggccccagaacccatgccccaaggcacaaagaggagctcagggtaggcccaaagattcgaattccttagattactaaatcacatgagcggaccttgtctgtcagataagatttttacctggaaattccatgaccaatacatgtgcaaaagaaaatgatgggttgaatttactgattattgacctaatggatggctttttaaaatgttttaataaaaagcagaatagatgtttgtttttctagtggttataccaagctatacttcctgttttcacgtgtgaaagtaacatgggacatgcctttcttttccgatcagtttatttaagctatacagcaaactttggcatttatgtggagcatttctcattgttggaatctgaataaaccaattacaaaataaaaa

SEQ ID NO: 227 - protein, 393 aa, Human
MWWRVLSLLAWFPLQEASLTNHTETITVEEGQTLTLKCVTSLRKNSSLQWLTPSGFTIFLNEYPALKNSKYQLLHHSANQLSITVPNVTLQDEGVYKCLHYSDSVSTKEVKVIVLATPFKPILEASVIRKQNGEEHVVLMCSTMRSKPPPQITWLLGNSMEVSGGTLHEFETDGKKCNTTSTLIIHTYGKNSTVDCIIRHRGLQGRKLVAPFRFEDLVTDEETASDALERNSLSSQDPQQPTSTVSVTEDSSTSEIDKEEKEQTTQDPDLTTEANPQYLGLARKKSGILLLTLVSFLIFILFIIVQLFIMKLRKAHVIWKRENEVSEHTLESYRSRSNNEETSSEEKNGQSSHPMRCMNYITKLYSEAKTKRKENVQHSKLEEKHIQVPESIV

SEQ ID NO: 228 - DNA, 1820 bp, Human
ggagctactcagaagcgggagtctccgagagaagaaaagcaggtggaaggagaggaagcggatgccgtggggtttacagcaggaaaatccgtggagacagcagatccgagaagcggcgatgtttgcgtagaaccctctcttcccttctctctgaccagcaccatgcttctcctggtgacaagccttctgctctgtgagttaccacacccagcattcctcctgatcccagagaaatcggatctgcgaacagtggcaccagcctctagtctcaatgtgaggtttgactccaggacgatgaatttaagctgggactgccaagaaaacacaaccttcagcaagtgtttcttaactgacaagaagaacagagtcgtggaacccaggctcagtaacaacgaatgttcgtgcacatttcgtgaaatttgtctgcatgaaggagtcacatttgaggttcacgtgaatactagtcaaagaggatttcaacagaaactgctttatccaaattcaggaagggagggtaccgctgctcagaatttctcctgtttcatctacaatgcggatttaatgaactgtacctgggcgaggggtccgacggccccccgtgacgtccagtattttttgtacatacgaaactcaaagagaaggagggagatccggtgtccttattacatacaagactcaggaacccatgtgggatgtcacctggataacctgtcaggattaacgtctcgcaattactttctggttaacggaaccagccgagaaattggcatccaattctttgattcacttttggacacaaagaaaatagaacgattcaaccctcccagcaatgtcaccgtacgttgcaacacgacgcactgcctcgtacggtggaaacagcccaggacctatcagaagctgtcgtacctggactttcagtaccagctggacgtccacagaaagaatacccagcctggcacggaaaacctactgattaatgtttctggtgatttggaaaatagatacaactttccaagctctgagcccagagcaaaacacagtgtgaagatcagagctgcagacgtccgcatcttgaattggagctcctggagtgaagccattgaatttggttctgacgacgggaacctcggctctgtgtacatttatgtgctcctaatcgtgggaacccttgtctgtggcatcgtcctcggcttcctctttaaaaggttccttaggatacagcggctgttcccgccagttccacagatcaaagacaaactgaatgataaccatgaggtggaagacgagatcatctgggaggaattcaccccagaggaagggaaaggctaccgcgaagaggtcttgaccgtgaaggaaattacctgagacccagagggtgtaggaatggcatggacatctccgcctccgcgacacgggggaactgttttcttgatgatgctgtgaacctttatatcattttctatgtttttatttaaaaacatgacatttggggccaggcgcggtggctcacgcctgtaatcccagcactttgggaggccaaggcaggcggatcacctgaggtcaggagttcaagaccagcctgcccaacatggtgaaaccccatctggactaaaaatgcagaaatttacccaggcacggcggcggacgcccatcatcccagctacttgggaggctgaggcaggagaattgcttgaacccgtgaggcggaggttgtagtgagccaagatcgcaccattgcacaccaacctgggtgacagagcaagattgcatctcaaaacaaacaataataataaataataaaaacctgatatttggctggg

SEQ ID NO: 229 - DNA, 2502 bp, Human
tattcatcaagtgccctctagctgttaagtcactctgatctctgactgcagctcctactgttggacacacctggccggtgcttcagttagatcaaaccattgctgaaactgaagaggacatgtcaaatattacagatccacagatgtgggattttgatgatctaaatttcactggcatgccacctgcagatgaagattacagcccctgtatgctagaaactgagacactcaacaagtatgttgtgatcatcgcctatgccctagtgttcctgctgagcctgctgggaaactccctggtgatgctggtcatcttatacagcagggtcggccgctccgtcactgatgtctacctgctgaacctggccttggccgacctactctttgccctgaccttgcccatctgggccgcctccaaggtgaatggctggatttttggcacattcctgtgcaaggtggtctcactcctgaaggaagtcaacttctacagtggcatcctgctgttggcctgcatcagtgtggaccgttacctggccattgtccatgccacacgcacactgacccagaagcgtcacttggtcaagtttgtttgtcttggctgctggggactgtctatgaatctgtccctgcccttcttccttttccgccaggcttaccatccaaacaattccagtccagtttgctatgaggtcctgggaaatgacacagcaaaatggcggatggtgttgcggatcctgcctcacacctttggcttcatcgtgccgctgtttgtcatgctgttctgctatggattcaccctgcgtacactgtttaaggcccacatggggcagaagcaccgagccatgagggtcatctttgctgtcgtcctcatcttcctgctttgctggctgccctacaacctggtcctgctggcagacaccctcatgaggacccaggtgatccaggagagctgtgagcgccgcaacaacatcggccgggccctggatgccactgagattctgggatttctccatagctgcctcaaccccatcatctacgccttcatcggccaaaattttcgccatggattcctcaagatcctggctatgcatggcctggtcagcaaggagttcttggcacgtcatcgtgttacctcctacacttcttcgtctgtcaatgtctcttccaacctctgaaaaccatcgatgaaggaatatctcttctcagaaggaaagaataaccaacaccctgaggttgtgtgtggaaggtgatctggctctggacaggcactatctgggttttggggggacgctataggatgtggggaagttaggaactggtgtcttcaggggccacaccaaccttctgaggagctgttgaggtacctccaaggaccggcctttgcacctccatggaaacgaagcaccatcattcccgttgaacgtcacatctttaacccactaactggctaattagcatggccacatctgagccccgaatctgacattagatgagagaacagggctgaagctgtgtcctcatgagggctggatgctctcgttgaccctcacaggagcatctcctcaactctgagtgttaagcgttgagccaccaagctggtggctctgtgtgctctgatccgagctcaggggggtggttttcccatctcaggtgtgttgcagtgtctgctggagacattgaggcaggcactgccaaaacatcaacctgccagctggccttgtgaggagctggaaacacatgttccccttgggggtggtggatgaacaaagagaaagagggtttggaagccagatctatgccacaagaaccccctttacccccatgaccaacatcgcagacacatgtgctggccacctgctgagccccaagtggaacgagacaagcagcccttagcccttcccctctgcagcttccaggctggcgtgcagcatcagcatccctagaaagccatgtgcagccaccagtccattgggcaggcagatgttcctaataaagcttctgttccgtgcttgtccctgtggaagtatcttggttgtgacagagtcaagggtgtgtgcagcattgttggctgttcctgcagtagaatgggggcagcacctcctaagaaggcacctctctgggttgaagggcagtgttccctggggctttaactcctgctagaacagtctcttgaggcacagaaactcctgttcatgcccatacccctggccaaggaagatccctttgtccacaagtaaaaggaaatgctcctccagggagtctcagcttcaccctgaggtgagcatcatcttctgggttaggccttgcctaggcatagccctgcctcaagctatgtgagctcaccagtccctccccaaatgctttccatgagttgcagttttttcctagtctgttttccctccttggagacagggccctgtcggtttattcactgtatgtccttggtgcctggagcctactaaatgctcaataaataatgatcacaggaaaaaaaaaaaaaaaaaa

SEQ ID NO: 230 - DNA, 2921 bp, Human
gtcgacccacgcgtccgtgccagtctccggggactttcccaggggtggggcggcgtgtccgggcccccggcacttcctcgtcctcggcccgggtgccctgcccccgtccaggagccctaggagtgctacggggggccggagccttgcccgggccgctgccccgtccctggattcggggctggacgcagcaagcggggcgctgtgtccccaagctccccgtcctcgcagcgggcacaggcaggggctgagctaccctcatggaagggagaggaccgtaccggatctacgaccctgggggcagcgtgccctcaggagaggcatccgcagcttttgagcgcctagtgaaggagaattcccggctgaaggaaaaaatgcaagggataaagatgttaggggagcttttggaagagtcccagatggaagcgaccaggctccggcagaaggcagaggagctagtgaaggacaacgagctgctcccaccaccttctccctccttgggctccttcgaccccctggctgagctcacaggaaaggactcaaatgtcacagcatctcccacagcccctgcatgccccagtgacaagccagcaccagtccagaagcctccatccagtggcacctcctctgaatttgaagtggtcactcctgaggagcagaattcaccagagagcagcagccatgccaatgcgatggcgctgggccccctgccccgtgaggacggcaacctgatgctgcacctgcagcgcctggagaccacgctgagtgtgtgtgccgaggagccggaccacggccagctcttcacccacctgggccgcatggccctggagttcaaccgactggcatccaaggtgcacaagaatgagcagcgcacctccattctgcagaccctgtgtgagcagcttcggaaggagaacgaggctctgaaggccaagttggataagggcctggaacagcgggatcaggctgccgagaggctgcgggaggaaaatttggagctcaagaagttgttgatgagcaatggcaacaaagagggtgcgtctgggcggccaggctcaccgaagatggaagggacaggcaagaaggcagtggctggacagcagcaggctagtgtgacggcaggtaaggtcccagaggtggtggccttgggcgcacccgagaagaaggtgaagatgctggagcagcagcgcagtgagctgctggaagtgaacaagcagtgggaccagcatttccggtccatgaagcagcagtatgagcagaagatcactgagctgcgtcagaagctggctgatttgcagaagcaggtgactgacctggaggccgagcgggagcagaagcagcgtgactttgaccgcaagctcctcctggccaagtccaagattgaaatggaggagaccgacaaggagcagctgacagcagaggccaaggagctgcgccaaaaggtcaagtacctgcaggatcagctgagcccactcacccgacagcgtgagtaccaggaaaaggagatccagcggctcaacaaggccctggaggaagcactgagcatccaaaccccgccatcatctccaccaacagcatttgggagcccagaaggagcaggggccctcctaaggaaacaggagctggtcacgcagaatgagttgctgaaacagcaggtgaagatcttcgaggaggacttccagagggagcgcagtgatcgtgagcgcatgaatgaggagaaggaagagctgaagaagcaagtggagaagctgcaggcccaggtcaccctgtcaaatgcccagctaaaagcattcaaagatgaggagaaggcaagagaagccctcagacagcagaagaggaaagcaaaggcctcaggagagcgttaccatgtggagccccacccagaacatctctgcggggcctacccctacgcctacccgcccatgccagccatggtgccacaccatggcttcgaggactggtcccagatccgctacccccctccccccatggccatggagcacccgcccccactccccaactcgcgcctcttccatctgccggaatacacctggcgtctaccctgtggaggggttcgaaatccaaatcagagctcccaagtgatggaccctcccacagccaggcctacagaaccagagtctccaaaaaatgaccgtgaggggcctcagtgagaccagattgtgtcatttggctccaccttcatcttgcagagccagctgatctcaattgccaaaaactagaagccacttgcacggtgtggccagagcctcagctggatgagaggctgagatgggtggccagcttgtacaccagtccctgaactgagctgtttacaggactggggaggctccacccagaaggctttcatttgtactctgctgggagtgactgggaaaaactccttccctgctgctgagtggagagaggcctcatccggctttgacccccatccttgcagaagcctccaggagcagcaatcctaagagtgggaggcagccaagacccccttccttcaaaacctcccggaagtggtttcaggccctctagttgccatgaccaatttgtgtgtgtgtttaatttttgcttcaagctctgtagcaggacctgccccacgcacacccctacccctctgtgaggagctgtgggaagtgtgggtttgtctccagaacagaagagaatgatggatattctggctctggggccctctccaccaccactcacagtagccttgctgaagccatcacagatgggagaaggccatgccagccacgtccgccgaggggcgccagcctgaagctgccaggccctgaggttcagaccctggaccccatagctggaggcctgtggtgccagaagcccagattagggtggctgtccatccctggatagctatttgcacgaatcatggacataaatccaagttg

SEQ ID NO: 231 - protein, 636 aa, Human
MEGRGPYRIYDPGGSVPSGEASAAFERLVKENSRLKEKMQGIKMLGELLEESQMEATRLRQKAEELVKDNELLPPPSPSLGSFDPLAELTGKDSNVTASPTAPACPSDKPAPVQKPPSSGTSSEFEVVTPEEQNSPESSSHANAMALGPLPREDGNLMLHLQRLETTLSVCAEEPDHGQLFTHLGRMALEFNRLASKVHKNEQRTSILQTLCEQLRKENEALKAKLDKGLEQRDQAAERLREENLELKKLLMSNGNKEGASGRPGSPKMEGTGKKAVAGQQQASVTAGKVPEVVALGAPEKKVKMLEQQRSELLEVNKQWDQHFRSMKQQYEQKITELRQKLADLQKQVTDLEAEREQKQRDFDRKLLLAKSKIEMEETDKEQLTAEAKELRQKVKYLQDQLSPLTRQREYQEKEIQRLNKALEEALSIQTPPSSPPTAFGSPEGAGALLRKQELVTQNELLKQQVKIFEEDFQRERSDRERMNEEKEELKKQVEKLQAQVTLSNAQLKAFKDEEKAREALRQQKRKAKASGERYHVEPHPEHLCGAYPYAYPPMPAMVPHHGFEDWSQIRYPPPPMAMEHPPPLPNSRLFHLPEYTWRLPCGGVRNPNQSSQVMDPPTARPTEPESPKNDREGPQ

SEQ ID NO: 232 - DNA, 4266 bp, Human
tggggtgacatgagtgactccaaggaaccaagactgcagcagctgggcctcctggaggaggaacagctgagaggccttggattccgacagactcgaggatacaagagcttagcagggtgtcttggccatggtcccctggtgctgcaactcctctccttcacgctcttggctgggctccttgtccaagtgtccaaggtccccagctccataagtcaggaacaatccaggcaagacgcgatctaccagaacctgacccagcttaaagctgcagtgggtgagctctcagagaaatccaagctgcaggagatctaccaggagctgacccagctgaaggctgcagtgggtgagcttccagagaaatctaagctgcaggagatctaccaggagctgacccggctgaaggctgcagtgggtgagcttccagagaaatctaagctgcaggagatctaccaggagctgacctggctgaaggctgcagtgggtgagcttccagagaaatctaagatgcaggagatctaccaggagctgactcggctgaaggctgcagtgggtgagcttccagagaaatctaagcagcaggagatctaccaggagctgacccggctgaaggctgcagtgggtgagcttccagagaaatctaagcagcaggagatctaccaggagctgacccggctgaaggctgcagtgggtgagcttccagagaaatctaagcagcaggagatctaccaggagctgacccagctgaaggctgcagtggaacgcctgtgccacccctgtccctgggaatggacattcttccaaggaaactgttacttcatgtctaactcccagcggaactggcacgactccatcaccgcctgcaaagaagtgggggcccagctcgtcgtaatcaaaagtgctgaggagcagaacttcctacagctgcagtcttccagaagtaaccgcttcacctggatgggactttcagatctaaatcaggaaggcacgtggcaatgggtggacggctcacctctgttgcccagcttcaagcagtattggaacagaggagagcccaacaacgttggggaggaagactgcgcggaatttagtggcaatggctggaacgacgacaaatgtaatcttgccaaattctggatctgcaaaaagtccgcagcctcctgctccagggatgaagaacagtttctttctccagcccctgccaccccaaacccccctcctgcgtagcagaacttcacccccttttaagctacagttccttctctccatccttcgaccttcacaaaatctctgggactgttctttgtcagattcttcctcctttagaaggctgggtcccattctgtccttcttgtcatgcctccaatttcccctggtgtagagcttgtttttctggcccatccttggagctttatgagtgagctggtgtgggatgcctttgggggtggacttgtgttccaagaatccactctctcttccttttggagattaggatatttgggttgccatgtgtagctgctatgtcccctggggcgttatctcatacatgcaaacctaccatctgttcaacttccacctaccacctcctgcacccctttgatcggggacttactggttgcaagagctcattttgcaggctggaagcaccagggaattaattcccccagtctaccaatggcacccagagagggcatggaggctccacgcaaccccttccacccccacatcttcctttgtcttatacatggcttccatttggctgtttctaagttgtattctttattttattattattattactatttttcgagatggagtttcactcttgtcgctcaggctggagtgccatggcgcgatcttggctcactgcaacctctgcctcccgggttcaagtgattctcctgcctcagcctcacgagtagctggaattacaggcaggcgccaccaggcccggctaattttttgtatttttagtacagacggggtttctccgtgttggtcaggctggtcttgaactcccgacctcagatgatctgcccgcctcggcctcccaaaattgctgggattacaggtgtgagccaccgcgcctggcctattattttttgtaagaataaaacaggtttactgggatttgggactctgaacagttctgtctctactacctgatctcctcctaccacgactttgggatctagaggagctttggctccggctgtgacggctccggccgttctcactgcggctgcaccggcccccgctgcggtcactatttcttcctctgcttggtgaattgtgcctctcctggctctttgacatgtgctagtgagatttcttccttttcctttcggattccccatttcttttgtaggaatggtctggactagggttctccttccccgcagcctgtagtattcatcgtggtggcccatcctctctctccccttggagctcttgccaaaggaggagacaagcagaggtctctattggatttctcaacacctgaagaaagttgcagtgttttcctcttggacattgttgtatttcaaataaaccacaaatcatcattttccaccgagccactgggcagaattcacactgaagctgtcgtcctgcgtacataccatcgtccgttaaacagagaaagagctgcttggcattcttcttccgactggtactgaacatatatacttgcccctcaggtgaggttccaagttgcaactgaccttgaactgaatcactctccccacgttattttttaattactatttttttttaaagatggggtcttgctctgtcgccaggctggagtgcagtggcgcgatctaggctcactgcaacttccgcctcccgggttcaagcgattctcctgcctcagcctcccgagtagctgggactctactaaaagtacaaaaattagctggcgtgcaccaccgcgcccagctaattcttgtatttttggtagagacggggtttcaacatgttgaccaggatggtctcgatctcttgacctcgtgattcgcccgccgcgtcctcccaaagtgctgggattacaggcctgagccaccgcgcccagtctctccccacgttcttgaactcgggcagcacatcctcacagaaatctaggaactgttggtaggtttcttcctcgctgtactccaggcttgcttcggagtcatagtcatccctcctgcactgctcctttccaaacactgtaaacatgcttttaataagaagggtaggactggatgttgggaaatcatgtgaacatctatctccaaatctgcaagctcctgttttactgtagaagggacaattaactccatccttctccatgactctgaaatccaagggggggttccgggttttgccatgtggcgccattttccaactcattttcagcctgatccagcatcttctggacagcttccggtttttgtttcttctgtcgtttctgttcctcctcctctctctctttcctctgctgttcttcccattgttcctttaactttcgctcttgttcttgccgttttctagccacctcttccttttccttctttattctgaattcttcttgtgccttctgctctctcagcaaccactcctcatgtaatctttgcctctctcttccccatagcttttctagttgttgtttttcaataaaagtgtcctcctctttctgtgagagtcctgagtccctcagtggagcaagttcctgctggcgtttctttcgtttctccttcttcagggcggccctgtactttttgtggcttggtttctctggaaatgtcaccttttcgggcgcagccatcttgccggcaccgccccgcccctctagttgtatcctttataataaaatggtaaacattgtaaccgcagattcagcccaatctggttcaactttgtgtaataaaatggcgagttgtttttcagttgtcgtggacccccaggttgcaagttacataccctgggcatgtccagatgaacgaagcgtgcaaatccacgtggaacctaagtgctcagactgaggaacagggactgagttaagaagtggacaccacgtggcatgatccttgatccaatcagattgagccctggcgtgatccagtcagatcaagcctcctgaatcccctcattacaagatccaatcatatcatgcctcactaccctctgtatataaaatctgccccagcctccaacttggagagacagatttgggccagactcctgtgtccttgcttggctgccttgcaataaatttttctctctaca

SEQ ID NO: 233 - protein, 404 aa, Human
MSDSKEPRLQQLGLLEEEQLRGLGFRQTRGYKSLAGCLGHGPLVLQLLSFTLLAGLLVQVSKVPSSISQEQSRQDAIYQNLTQLKAAVGELSEKSKLQEIYQELTQLKAAVGELPEKSKLQEIYQELTRLKAAVGELPEKSKLQEIYQELTWLKAAVGELPEKSKMQEIYQELTRLKAAVGELPEKSKQQEIYQELTRLKAAVGELPEKSKQQEIYQELTRLKAAVGELPEKSKQQEIYQELTQLKAAVERLCHPCPWEWTFFQGNCYFMSNSQRNWHDSITACKEVGAQLVVIKSAEEQNFLQLQSSRSNRFTWMGLSDLNQEGTWQWVDGSPLLPSFKQYWNRGEPNNVGEEDCAEFSGNGWNDDKCNLAKFWICKKSAASCSRDEEQFLSPAPATPNPPPA

SEQ ID NO: 234 - DNA, 947 bp, Human
ggctcggggccggggccagcacccacactgggtctccacagcggcatggaggcctgcgtgtcttcactgctggtgctggccctgggggccctgtcagtaggcagctcctttgggacccagatcatcgggggccgggaggtgatcccccactcgcgcccgtacatggcctcactgcagagaaatggctcccacctgtgcgggggtgtcctggtgcacccaaagtgggtgctgacggctgcccactgcctggcccagcggatggcccagctgaggctggtgctggggctccacaccctggacagccccggtctcaccttccacatcaaggcagccatccagcaccctcgctacaagcccgtccctgccctggagaacgacctcgcgctgcttcagctggacgggaaagtgaagcccagccggaccatccggccgttggccctgcccagtaagcgccaggtggtggcagcagggactcggtgcagcatggccggctgggggctgacccaccagggcgggcgcctgtcccgggtgctgcgggagctggacctccaagtgctggacacccgcatgtgtaacaacagccgcttctggaacggcagcctctcccccagcatggtctgcctggcggccgactccaaggaccaggctccctgcaagggtgactcgggcgggcccctggtgtgtggcaaaggccgggtgttggccggagtcctgtccttcagctccagggtctgcactgacatcttcaagcctcccgtggccaccgctgtggcgccttacgtgtcctggatcaggaaggtcaccggccgatcggcctgatgccctggggtgatggggaccccctcgctgtctccacaggacccttcccctccaggggtgcagtggggtgggtgaggacgggtgggagggacagggagggaccaataaatcataatgaagaaacgctc

SEQ ID NO: 235 - protein, 257 aa, Human
MEACVSSLLVLALGALSVGSSFGTQIIGGREVIPHSRPYMASLQRNGSHLCGGVLVHPKWVLTAAHCLAQRMAQLRLVLGLHTLDSPGLTFHIKAAIQHPRYKPVPALENDLALLQLDGKVKPSRTIRPLALPSKRQVVAAGTRCSMAGWGLTHQGGRLSRVLRELDLQVLDTRMCNNSRFWNGSLSPSMVCLAADSKDQAPCKGDSGGPLVCGKGRVLAGVLSFSSRVCTDIFKPPVATAVAPYVSWIRKVTGRSA

SEQ ID NO: 236 - DNA, 2672 bp, Human
aggaagagccgcgggcccggcggctgaggccaccccggcggcggctggagagcgaggaggagcgggtggccccgcgctgcgcccgccctcgcctcacctggcgcaggtggacacctgcgcaggtgtgtgccctccggcccctgaagcatggccagcagcggcatggctgacagcgccaaccacctgcccttctttttcggcaacatcacccgggaggaggcagaagattacctggtccaggggggcatgagtgatgggctttatttgctgcgccagagccgcaactacctgggtggcttcgccctgtccgtggcccacgggaggaaggcacaccactacaccatcgagcgggagctgaatggcacctacgccatcgccggtggcaggacccatgccagccccgccgacctctgccactaccactcccaggagtctgatggcctggtctgcctcctcaagaagcccttcaaccggccccaaggggtgcagcccaagactgggccctttgaggatttgaaggaaaacctcatcagggaatatgtgaagcagacatggaacctgcagggtcaggctctggagcaggccatcatcagtcagaagcctcagctggagaagctgatcgctaccacagcccatgaaaaaatgccttggttccatggaaaaatctctcgggaagaatctgagcaaattgtcctgataggatcaaagacaaatggaaagttcctgatccgagccagagacaacaacggctcctacgccctgtgcctgctgcacgaagggaaggtgctgcactatcgcatcgacaaagacaagacagggaagctctccatccccgagggaaagaagttcgacacgctctggcagctagtcgagcattattcttataaagcagatggtttgttaagagttcttactgtcccatgtcaaaaaatcggcacacagggaaatgttaattttggaggccgtccacaacttccaggttcccatcctgcgacttggtcagcgggtggaataatctcaagaatcaaatcatactccttcccaaagcctggccacagaaagtcctcccctgcccaagggaaccggcaagagagtactgtgtcattcaatccgtatgagccagaacttgcaccctgggctgcagacaaaggcccccagagagaagccctacccatggacacagaggtgtacgagagcccctacgcggaccctgaggagatcaggcccaaggaggtttacctggaccgaaagctgctgacgctggaagacaaagaactgggctctggtaattttggaactgtgaaaaagggctactaccaaatgaaaaaagttgtgaaaaccgtggctgtgaaaatactgaaaaacgaggccaatgaccccgctcttaaagatgagttattagcagaagcaaatgtcatgcagcagctggacaacccgtacatcgtgcgcatgatcgggatatgcgaggccgagtcctggatgctagttatggagatggcagaacttggtcccctcaataagtatttgcagcagaacagacatgtcaaggataagaacatcatagaactggttcatcaggtttccatgggcatgaagtacttggaggagagcaattttgtgcacagagatctggctgcaagaaatgtgttgctagttacccaacattatgccaagatcagtgatttcggactctccaaagcactgcgtgctgatgaaaactactacaaggcccagacccatggaaagtggcctgtcaagtggtacgctccggaatgcatcaactactacaagttctccagcaaaagcgatgtctggagctttggagtgttgatgtgggaagcattctcctatgggcagaagccatatcgagggatgaaaggaagtgaagtcaccgctatgttagagaaaggagagcggatggggtgccctgcagggtgtccaagagagatgtacgatctcatgaatctgtgctggacatacgatgtggaaaacaggcccggattcgcagcagtggaactgcggctgcgcaattactactatgacgtggtgaactaaccgctcccgcacctgtcggtggctgcctttgatcacaggagcaatcacaggaaaatgtatccagaggaattgattgtcagccacctccctctgccagtcgggagagccaggcttggatggaacatgcccacaacttgtcacccaaagcctgtcccaggactcaccctccacaaagcaaaggcagtcccgggagaaaagacggatggcaggatccaaggggctagctggatttgtttgttttcttgtctgtgtgattttcatacaggttatttttacgatctgtttccaaatccctttcatgtctttccacttctctgggtcccggggtgcatttgttactcatcgggcccagggacattgcagagtggcctagagcactctcaccccaagcggccttttccaaatgcccaaggatgccttagcatgtgactcctgaagggaaggcaaaggcagaggaatttggctgcttctacggccatgagactgatccctggccactgaaaagctttcctgacaataaaaatgttttgaggctttaaaaagaaaatcaagtttgaccagtgcagtttctaagcatgtagccagttaaggaaagaaagaaaaaaaaaaaaaaaaaa

SEQ ID NO: 237 - DNA, 6771 bp, Human
ggggggtctgctctgtgcggtgaagcttctcttcttggcacctgcctggcatcggaagagggccccttctccctccctgggcttttatgtggacactgtaatgcctcagttttctttctttctttttgtttttgacacagggtctcactctatcacccaagctggagtgcagtggcaccatcttagctcaccgcagcctcaaactccccagctcgggtgattcttcctgcctcagcctcctgagtagtagcagctgggaccacagacgtctgccaccaagcccagctgcaccgccagttccggggagggccctgggccagcggctgtccgccccccctcctttataaagtcctggcctcgggacagcccgcacagctgcccagcctgcggagacgggacagccctgtcccactcactctttcccctgctgctcctgccggcagctcagctggaaccatgggaggccgcgtctttctcgtctttctcgcattctgtgtctggctgactctgccgggagctgaaacccaggactccaggggctgtgcccggtggtgccctcaggactcctcgtgtgtcaatgccaccgcctgtcgctgcaatccagggttcagctctttttctgagatcatcaccacccccatggagacttgtgacgacatcaacgagtgtgcaacactgtcgaaagtgtcatgcggaaaattctcggactgctggaacacagaggggagctacgactgcgtgtgcagcccaggatatgagcctgtttctggggcaaaaacattcaagaatgagagcgagaacacgtgtcaagatgtggacgaatgtcagcagaacccaaggctctgtaaaagctacggcacctgcgtcaacaccctcggcagctacacgtgccagtgcctgcctggcttcaagctcaaacctgaggacccgaagctctgcacagatgtgaatgaatgcacctccggacaaaacccatgccacagctccacccactgcctcaacaacgtgggcagctatcagtgccgctgccgcccgggctggcaaccgattccggggtcccccaatggcccaaacaataccgtctgtgaagatgtggacgagtgcagctccgggcagcatcagtgtgacagctccaccgtctgcttcaacaccgtgggttcatacagctgccgctgccgcccaggctggaagcccagacacggaatcccgaataaccaaaaggacactgtctgtgaagatatgactttctccacctggaccccgccccctggagtccacagccagacgctttcccgattcttcgacaaagtccaggacctgggcagagactacaagccaggcttggccaataacaccatccagagcatcttacaggcgctggatgagctgctggaggcccctggggacctggagaccctgccccgcttacagcagcactgtgtggccagtcacctgctggatggcctagaggatgtcctcagaggcctgagcaagaacctttccaatgggctgttgaacttcagttatcctgcaggcacagaattgtccctggaggtgcagaagcaagtagacaggagtgtcaccttgagacagaatcaggcagtgatgcagctcgactggaatcaggcacagaaatctggtgacccaggcccttctgtggtgggccttgtctccattccagggatgggcaagttgctggctgaggcccctctggtcctggaacctgagaagcagatgcttctgcatgagacacaccagggcttgctgcaggacggctcccccatcctgctctcagatgtgatctctgcctttctgagcaacaacgacacccaaaacctcagctccccagttaccttcaccttctcccaccgttcagtgatcccgagacagaaggtgctctgtgtcttctgggagcatggccagaatggatgtggtcactgggccaccacaggctgcagcacaataggcaccagagacaccagcaccatctgccgttgcacccacctgagcagctttgccgtcctcatggcccactacgatgtgcaggaggaggatcccgtgctgactgtcatcacctacatggggctgagcgtctctctgctgtgcctcctcctggcggccctcacttttctcctgtgtaaagccatccagaacaccagcacctcactgcatctgcagctctcgctctgcctcttcctggcccacctcctcttcctcgtggcaattgatcaaaccggacacaaggtgctgtgctccatcatcgccggtaccttgcactatctctacctggccaccttgacctggatgctgctggaggccctgtacctcttcctcactgcacggaacctgacggtggtcaactactcaagcatcaacagattcatgaagaagctcatgttccctgtgggctacggagtcccagctgtgacagtggccatttctgcagcctccaggcctcacctttatggaacaccttcccgctgctggctccaaccagaaaagggatttatatggggcttccttggacctgtctgcgccatcttctctgtgaatttagttctctttctggtgactctctggattttgaaaaacagactctcctccctcaatagtgaagtgtccaccctccggaacacaaggatgctggcatttaaagcgacagctcagctgttcatcctgggctgcacgtggtgtctgggcatcttgcaggtgggtccggctgcccgggtcatggcctacctcttcaccatcatcaacagcctgcagggtgtcttcatcttcctggtgtactgcctcctcagccagcaggtccgggagcaatatgggaaatggtccaaagggatcaggaaattgaaaactgagtctgagatgcacacactctccagcagtgctaaggctgacacctccaaacccagcacggttaactagaaaaatcttctgaataagatcttccctctttgcccgtggaaaatctgaacaatctttgagccatctagaggggaaagaaaagactttgttctgtgtgtttcaagaaattcaccatgtcagcaatatgaaggatgttatggaaggcgtgctaggcattcaattcctgcagaaaccggaaatcttccatgccctgcaatgtgctcatcaaactctcagcatatggacggccagctgtggcccatatcttggtcactctgaagcacaatatttatgaagctatagaacgttaagacctctttcacagcctctccttcctacaaagactcctccaaatcttaaaatgaagcaggaaaacgagcctaagaggactttcataccgacaacatctgaaaggactagaatgttcacaccacgatctggatttcttaattttttgtttttgtttttgttgttctctagttctacgggtttgattatttagtcatgtgaaaaatattgattactcacacatagatcaagagagacacggctcctgccttcatggagcttttaggggaaaatgaagtggctcttgcagctagagttgactcagaagccgaaattcctagaaatcaggtttctactgctaggcaattgaagtataaactattttataaacactgtcttctttcgtcttcacaccaacatgcagaaaagtttctaatctcagatcggggatgtgcaacaaattccatttcaaaggaatgacctgcaaaactcctaaatattccaagcaaatgcccttaaccctgtctgttatctgctttccttgaacagaaattctacatgaccataaaacctcgaagatgggtatggcacagttcatgccctgtaatcctagcactttgggagggtgaggcaggaggatggctcaagcccaggagtttgagaccagtgtgggcaacagagtgagaaccatctctacccaaaaaaaaaattaaaaattagccaagcatggtgatgatataggagttaaggagaaatcatttaggcaaatagcaagggtaggaagtcctcagtaaggttttccatttaatgaaaagcagcccccaaaatcattttcttttctaacaaagaacagcctgtaaaatcgagctgcagacatagacaagcaagctggaagcttccacgggtgaatgccggcagctgtgccaataggaaaaagctacctagactaggcatgtccaaaatggcggctccaagttcccttctctttgccagccatgtgtacagtaaaaagcaggcaacatagtgtcagccaaagctcatttgcataataagattagggtggggtggccagctcacataggggtaggccctaggtaaatcagacaccgccttctcaagcctgtctataaaatctggtacactatgacgagggtcagatttcccattcagacgcccctctcccatgcaagagaaagagctgttctcctttctctttcttttgcctattaaacctctgctcctggccaggcacagtggctcacgcctataatcccagcactttgggaggctgaggtggtcagatcacctaaggtcaggagttcaagaccagcctggtcaacatggtgaaatcttgtctctagtaaaaatacaaaaatatatgaaatctcacatagatgataatattaagttccaaaagcaactcaacctggtagattctaattttttttgaggcagggtcttgctttgtcacccatgctggagtacaatggcacaaacactgctcactgcagcctcgacctcccaaggcctaagcaatcctcctgcctcagtccccctccaggtatttgaaactacaggtgtgtaccaccacaccgggctaatttttgtattttttgtagagacgtgggtctcactatgctgcccaggctcaggtcttaatctcctgagctcaggcaatccgcaggcctcagcctccctaagtgcggggattacaggcttgagccactgcacctagcctctatttgttttacaaaagagaaattgagatcctgaatgttaagtgacttgcctgaggccatcccactaacaggagccagggttaggattcaaaccccatccaactggtcccagagctggagcttcttgcactgccctacactacctaccatctccatcctctgggcacctttttataagaaccaaaacattacagagcattgctttgtcaactcagctgggaacatttcccagtgcaactcacatttttcactgctctgtgcctgtccgtataagctcaatgagtattgatttaggggctttggagaactttgaatgctaccccccaagtaaccattgttggcaacctggtacctctacttttagccatttctccttctctataaatagtgcagaagtaacccacttggtaacaggcatccttgccaagcctccaccactaggtcagtgtaagaattaaagaaagaggaaagaaacacaaaaagtggcttgatggttaagacaggtttattttagagaaaacacacctgagaggggctgctggctgaattaggttagagtcttttctacagactaagagtgtttaaggatttagggtgggagagtttcttagaggcttggactgcttctgtgttttttttgttgtgcttatatgggagggagagtggtgtgtttgcttttatacatttttctgcagctgtaggcataccccccaagtctgcttttagcttccctattttagtgcacctggagggaaaggaatgtgcttattaaggcccactgttttactggggcccattgtatgagggtgaagtttggcagttacccaagagacttttcctccaccttcctctgtgcccgagctgttttatctgcattttactgtctgctttttttggctgcttatagtttttaaaaaagtaatttccttaaatccagaaggctaaaaatgaagctgaaacttaaagtggcggtgtttgtccaaaataacggggctcctgctctgccagtcagtaccctcaagtcactcctgatcctcaacctccatgcctaaggctggttcaagagaccacataatatctgccttttattacatacatgatgggtgcatgggattctgcgtgccctttgcttgatatagactgctaaggtgagatggggaatatcagagtcagctgctgcttgaggaagcagaacacacagctggaggcttggaacatgtgggtccctatgagtgtagagcccatatccccatagagtctacctagagcaggggtcgccaaatgttttcttaaagagcctgatagtgtatatgttaggctttgtgagccaggtatttacagcaactcaattctaccactgtggtatgaaaacagctatagacaatcataaatgaatgatcatggctatgttttaataaaactttacagacactgaacttgaacttccattgtgatatgaaaacagctatagacaatcataaatgaatgatcatggctatgttttaataaaactttatggacactgagcttgaacttcatatatcagtcatgtgacacaaaatatcattcttctttttatttgttttcacccatttgaaaaatgtaaaaactattcttagctgtacagaaacagatggtgggtcagatttgactcactgcccatagtttccagaccatgatgttcaggttcatggaagcacttcactctacactaatttattcatccattcatcacatatgtgatgagcacatacagacacacctcagagatattgcaggctccactccagatcaccacaataatgtgaatattgcaataaagcaagtcatacacatt

SEQ ID NO: 238 - protein, 823 aa, Human
MGGRVFLVFLAFCVWLTLPGAETQDSRGCARWCPQDSSCVNATACRCNPGFSSFSEIITTPMETCDDINECATLSKVSCGKFSDCWNTEGSYDCVCSPGYEPVSGAKTFKNESENTCQDVDECQQNPRLCKSYGTCVNTLGSYTCQCLPGFKLKPEDPKLCTDVNECTSGQNPCHSSTHCLNNVGSYQCRCRPGWQPIPGSPNGPNNTVCEDVDECSSGQHQCDSSTVCFNTVGSYSCRCRPGWKPRHGIPNNQKDTVCEDMTFSTWTPPPGVHSQTLSRFFDKVQDLGRDYKPGLANNTIQSILQALDELLEAPGDLETLPRLQQHCVASHLLDGLEDVLRGLSKNLSNGLLNFSYPAGTELSLEVQKQVDRSVTLRQNQAVMQLDWNQAQKSGDPGPSVVGLVSIPGMGKLLAEAPLVLEPEKQMLLHETHQGLLQDGSPILLSDVISAFLSNNDTQNLSSPVTFTFSHRSVIPRQKVLCVFWEHGQNGCGHWATTGCSTIGTRDTSTICRCTHLSSFAVLMAHYDVQEEDPVLTVITYMGLSVSLLCLLLAALTFLLCKAIQNTSTSLHLQLSLCLFLAHLLFLVAIDQTGHKVLCSIIAGTLHYLYLATLTWMLLEALYLFLTARNLTVVNYSSINRFMKKLMFPVGYGVPAVTVAISAASRPHLYGTPSRCWLQPEKGFIWGFLGPVCAIFSVNLVLFLVTLWILKNRLSSLNSEVSTLRNTRMLAFKATAQLFILGCTWCLGILQVGPAARVMAYLFTIINSLQGVFIFLVYCLLSQQVREQYGKWSKGIRKLKTESEMHTLSSSAKADTSKPSTVN

SEQ ID NO: 239 - DNA, 3226 bp, Human
aggaggagggccgggcgggcaggggaggaggaggaggcgggcgccgtgtcgcacgcagctccaggcggggcagccccggtagctgagggacgcagctagaccttggcgggacggggctttcgccggggcccaggcccagggaccaggcggaggcgtcgcgggagcctttggggcaccacagagatgcgggtttgcctgcaatgagatttcattctctacatttaaaggacatcctttctgagctgctgtgaataaatttggaatggtactgtatattttcatctaatggagaactagctgtactttgaataaggattgctgcactggacgactttagaacatccctcacaatgtcgtcaacccggagccagaacccccacggcctgaagcagattggcctggaccagatctgggacgacctcagagccggcatccagcaggtgtacacacggcagagcatggccaagtccagatatatggagctctacactcatgtttataactactgtactagtgttcaccagtcaaaccaagcacgaggagctggagttcctccttctaagtcgaaaaaggggcagacacctggaggagctcagtttgttggcctggaattatataaacgacttaaggaatttttgaagaattacttgacaaatcttcttaaggatggagaagatttgatggatgagagtgtactgaaattctacactcaacaatgggaagattatcgattttcaagcaaagtgctgaatggaatttgtgcctacctcaatagacattgggttcgccgtgaatgtgacgaaggacgaaaaggaatatatgaaatctattcgcttgcattggtgacttggagagactgtctgttcaggccactgaataaacaggtaacaaatgctgttttaaagctgattgaaaaggaaaggaatggtgaaaccatcaatacaagattgattagtggagttgtacagtcttacgtggaattggggctgaatgaagatgatgcatttgcaaagggccctacgttaacagtgtataaagaatcctttgaatctcaatttttggctgacacagagagattttataccagagagagtactgaattcttgcagcagaacccagttactgaatatatgaaaaaggcagaggctcgtctgcttgaggaacaacgaagagttcaggtttaccttcatgaaagcacacaagatgaattagcaaggaaatgtgaacaagtcctcattgaaaaacacttggaaattttccacacagaatttcagaatttattggatgctgacaaaaatgaagatttgggacgcatgtataatcttgtatctagaatccaggatggcctaggagaattgaaaaaactgttggagacacacattcataatcagggtcttgcagccattgaaaagtgtggagaagctgctttaaatgaccccaaaatgtatgtacagacagtgcttgatgttcataaaaaatacaatgccctggtaatgtctgcattcaacaatgacgctggctttgtggctgctcttgataaggcttgtggtcgcttcataaacaacaacgcggttaccaagatggcccaatcatccagtaaatcccctgagttgctggctcgatactgtgactccttgttgaagaaaagttccaagaacccagaggaggcagaactagaagacacactcaatcaagtgatggttgtcttcaagtacatagaagacaaagacgtatttcagaagttctatgcgaagatgctcgccaagaggctcgtccaccagaacagtgcaagtgacgatgccgaagccagcatgatctccaagttaaagcaagcttgcgggttcgagtacacctctaaacttcagcgcatgtttcaagacattggcgtgagcaaagatctgaacgagcaattcaaaaagcacttgacaaactcagaacccctagacttggatttcagcattcaagtgctgagctccgggtcctggcccttccagcagtcttgtacatttgccttgccgtcagagttggaacgtagttatcagcgattcacagctttctacgccagccgccacagtggccgaaaattgacgtggttatatcagttgtctaaaggagaattggtaactaactgcttcaaaaacagatatactttgcaggcgtcgacattccagatggctatcctgcttcagtacaacacggaagatgcctacactgtgcagcagctgaccgacagcactcaaattaaaatggacattttggcgcaagttttacagattttattaaagtcgaagctattggtcttggaagatgaaaatgcaaatgttgatgaggtggaattgaagccagataccttaataaaattatatcttggttataaaaataagaaattaagggttaacatcaatgtgccaatgaaaaccgaacagaagcaggaacaagaaaccacacacaaaaacatcgaggaagaccgcaaactactgattcaggcggccatcgtgagaatcatgaagatgaggaaggttctgaaacaccagcagttacttggcgaggtcctcactcagctgtcctccaggttcaaacctcgagtccctgtgatcaagaaatgcattgacattctaattgagaaagaatatttggagcgagtggatggtgaaaaggacacctacagttacttggcttaacccttctggaagggtctgactgtgtgacccgcagcaaatagttcatgttggaaagaatgaaaacaactcaagttcatagcagccagcctgccgccattggacctcccttttaaaaactgagaccaagactcccatcagctggtctcggatttacatcggaactgctcaggattgatacatttcaagtctgtaaatacggacaccaacgccatttaccctaatttaagaacagcggggactgaccctccgtgccgagggctgcatgctaccgcactaagtcaatacatgggctccccgattcgcagctgtcgtcttggcagcacttgtcacgttggcagcactttgagagcaagtctgagtggacccacatgtaacctgctatgaaaaccatttgtatagtgtgtttcattttttaatgtgtgaaaataaagaaaattaaaggatttctgtacaagtcgcattgggttttgttttaagttttactaatttctatatgtaaataaaagatataatgattgtgcaaatttaaaaaaaaaaaaaaaaaa

SEQ ID NO: 240 - protein, 776 aa, Human
MSSTRSQNPHGLKQIGLDQIWDDLRAGIQQVYTRQSMAKSRYMELYTHVYNYCTSVHQSNQARGAGVPPSKSKKGQTPGGAQFVGLELYKRLKEFLKNYLTNLLKDGEDLMDESVLKFYTQQWEDYRFSSKVLNGICAYLNRHWVRRECDEGRKGIYEIYSLALVTWRDCLFRPLNKQVTNAVLKLIEKERNGETINTRLISGVVQSYVELGLNEDDAFAKGPTLTVYKESFESQFLADTERFYTRESTEFLQQNPVTEYMKKAEARLLEEQRRVQVYLHESTQDELARKCEQVLIEKHLEIFHTEFQNLLDADKNEDLGRMYNLVSRIQDGLGELKKLLETHIHNQGLAAIEKCGEAALNDPKMYVQTVLDVHKKYNALVMSAFNNDAGFVAALDKACGRFINNNAVTKMAQSSSKSPELLARYCDSLLKKSSKNPEEAELEDTLNQVMVVFKYIEDKDVFQKFYAKMLAKRLVHQNSASDDAEASMISKLKQACGFEYTSKLQRMFQDIGVSKDLNEQFKKHLTNSEPLDLDFSIQVLSSGSWPFQQSCTFALPSELERSYQRFTAFYASRHSGRKLTWLYQLSKGELVTNCFKNRYTLQASTFQMAILLQYNTEDAYTVQQLTDSTQIKMDILAQVLQILLKSKLLVLEDENANVDEVELKPDTLIKLYLGYKNKKLRVNINVPMKTEQKQEQETTHKNIEEDRKLLIQAAIVRIMKMRKVLKHQQLLGEVLTQLSSRFKPRVPVIKKCIDILIEKEYLERVDGEKDTYSYLA

SEQ ID NO: 241 - DNA, 1258 bp, Human
gacataaaaaccgggtgccggcaggcgccagtcgcaggtgtgctgctgaggcgtgagaatggcgtcccgcggccggcgtccggagcatggcggacccccagagctgttttatgacgagacagaagcccggaaatacgttcgcaactcacggatgattgatatccagaccaggatggctgggcgagcattggagcttctttatctgccagagaataagccctgttacctgctggatattggctgtggcactgggctgagtggaagttatctgtcagatgaagggcactattgggtgggcctggatatcagccctgccatgctggatgaggctgtggaccgagagatagagggagacctgctgctgggggatatgggccagggcatcccattcaagccaggcacatttgatggttgcatcagcatttctgctgtgcagtggctctgtaatgctaacaagaagtctgaaaaccctgccaagcgcctgtactgcttttttgcttctcttttttctgttctcgtccggggatcccgagctgtcctgcagctgtaccctgagaactcagagcagttggagctgatcacaacccaggccacaaaggcaggcttctccggtggcatggtggtagactaccctaacagtgccaaagcaaagaaattctacctctgcttgttttctgggccttcgacctttataccagaggggctgagtgaaaatcaggatgaagttgaacccagggagtctgtgttcaccaatgagaggttcccattaaggatgtcgaggcggggaatggtgaggaagagtcgggcatgggtgctggagaagaaggagcggcacaggcgccagggcagggaagtcagacctgacacccagtacaccggccgcaagcgcaagccccgcttctaagtcaccacgcggttctggaaaggcacttgcctctgcacttttctatattgttcagctgacaaagtagtattttagaaaagttctaaagttataaaaatgttttctgcagtaaaaaaaaagttctctgggccgggcgtggtggctcacacctgtaatcccagcaccttgggaggctgaggtgggaggatcatttgaggccaggagtttgagacctgcctgggcaacataatgaaacttcctttccagggaggaaaaaaaaaaaaaaaaaaagctctgagagcatcttattttgtttaaaggcaagaaataaaatttccttttgtggaaaaaaaaaaaaaaaaaaaaaaaaaaaaa

SEQ ID NO: 242 - protein, 281 aa, Human
MASRGRRPEHGGPPELFYDETEARKYVRNSRMIDIQTRMAGRALELLYLPENKPCYLLDIGCGTGLSGSYLSDEGHYWVGLDISPAMLDEAVDREIEGDLLLGDMGQGIPFKPGTFDGCISISAVQWLCNANKKSENPAKRLYCFFASLFSVLVRGSRAVLQLYPENSEQLELITTQATKAGFSGGMVVDYPNSAKAKKFYLCLFSGPSTFIPEGLSENQDEVEPRESVFTNERFPLRMSRRGMVRKSRAWVLEKKERHRRQGREVRPDTQYTGRKRKPRF

SEQ ID NO: 243 - DNA, 1828 bp, Human
acttctccctagagcaggggtgtttgccagcagcctgcactctcagaaatcagacttgagtggccggaacccttgagaccagaggcttaccatgctgctccctaggagggccaggaactgctgacgtgaccactggacagttattcgtgtctcttacaattaccaaacagaatggacaagcttaataaaataaccgtccccgccagtcagaagttgaggcagcttcaaaagatggtccatgatattaaaaacaatgaaggtggaataatgaataaaatcaaaaagctaaaagtcaaagcacctccaagtgttcctcgaagggactacgcttcagagagccctgctgacgaagaggagcagtggtccgatgactttgacagcgactatgaaaatccagatgagcactcggactcagagatgtacgtgatgcccgccgaggagaacgctgatgacagctacgagccgcctccagtagagcaggaaaccaggccggttcacccagccctgcccttcgccagaggcgagtatatagacaatcgatcaagccagaggcattccccacccttcagcaagacacttcccagtaagcccagctggccttcagagaaagcaaggctcacctccaccctgccggccctgactgctttgcagaaacctcaagtcccacccaaacccaaaggcctccttgaggatgaggctgattatgtggtccccgtggaagataatgatgaaaactatattcatcccacagaaagcagttcacctccacctgaaaaagctcccatggtgaatagatcaaccaagccaaattcctcaacgcccgcctctcctccaggaacagcttcaggtcgaaacagtggggcctgggaaaccaagtcacctccaccagctgcaccatccccgttgccacgggccgggaaaaaaccaacgacaccactgaagacaactccagttgcctctcaacagaatgcttcaagtgtttgtgaagaaaaacctatacctgctgaacgccaccgagggtcaagtcacagacaagaagctgtgcagtcaccagtgtttcctcctgcccagaaacaaatccaccaaaaacccatacctctgccaagatttacagaagggggaaacccaactgtggatgggcccctacccagcttttcatctaattccactatttcagaacaggaagctggcgttctctgcaagccatggtatgctggagcctgtgatcgaaagtctgctgaagaggcattgcacagatcaaacaaggatggatcatttcttattcggaaaagctctggccatgattccaaacaaccatatacactagttgtattctttaataagcgagtatataatattcctgtgcgatttattgaagcaacaaaacaatatgccttgggcagaaagaaaaatggtgaagagtactttggaagtgttgctgaaatcatcaggaatcatcaacatagtcctttggttcttattgacagtcagaataacacaaaagattccaccagactgaagtatgcagttaaagtttcataaagggggaaaaaaaagatcaataccattgcttcagacactttcccaaagtttctccttttgagaaaaagtcccaaaacttcatattttggattatgaatcatccagtaataaaatggaagatggagtcagctattgaagtggtcatccatttctttttaagaagctcatgtggacttgttctattgcctgacctgatgaactgttaatatctggtgaggttgagttatcatgctactaatattttccaaataaatatttttatttttaaaaataaaaaaaaaaaaaa

SEQ ID NO: 244 - DNA, 2973 bp, Human
gattcccgggcccacccgacccagcggcgcaaccctggccctccgggaccctccgctgactccaccgcgcacttcccgggacccccacacacatcccagccctccggccgatccctccctactcggtgccgggtgccccccgccctctccaggcccggatctcctcccccaggtccccggggcggccccagccaggcccccttcgaaccccgccggcggcccgggctggggcgcaccatgcggctgcggctccggcttctggcgctgctgcttctgctgctggcaccgcccgcgcgcgccccgaagccctcggcgcaggacgtgagcctgggcgtggactggctgactcgctatggttacctgccgccaccccaccctgcccaggcccagctgcagagccctgagaagttgcgcgatgccatcaaagtcatgcagaggttcgcggggctgccggagaccggccgcatggacccagggacagtggccaccatgcgtaagccccgctgctccctgcctgacgtgctgggggtggcggggctggtcaggcggcgtcgccggtacgctctgagcggcagcgtgtggaagaagcgaaccctgacatggagggtacgttccttcccccagagctcccagctgagccaggagaccgtgcgggtcctcatgagctatgccctgatggcctggggcatggagtcaggcctcacatttcatgaggtggattccccccagggccaggagcccgacatcctcatcgactttgcccgcgccttccaccaggacagctaccccttcgacgggttggggggcaccctagcccatgccttcttccctggggagcaccccatctccggggacactcactttgacgatgaggagacctggacttttgggtcaaaagacggcgaggggaccgacctgtttgccgtggctgtccatgagtttggccacgccctgggcctgggccactcctcagcccccaactccattatgaggcccttctaccagggtccggtgggcgaccctgacaagtaccgcctgtctcaggatgaccgcgatggcctgcagcaactctatgggaaggcgccccaaaccccatatgacaagcccacaaggaaacccctggctcctccgccccagcccccggcctcgcccacacacagcccatccttccccatccctgatcgatgtgagggcaattttgacgccatcgccaacatccgaggggaaactttcttcttcaaaggcccctggttctggcgcctccagccctccggacagctggtgtccccgcgacccgcacggctgcaccgcttctgggaggggctgcccgcccaggtgagggtggtgcaggccgcctatgctcggcaccgagacggccgaatcctcctctttagcgggccccagttctgggtgttccaggaccggcagctggagggcggggcgcggccgctcacggagctggggctgcccccgggagaggaggtggacgccgtgttctcgtggccacagaacgggaagacctacctggtccgcggccggcagtactggcgctacgacgaggcggcggcgcgcccggaccccggctaccctcgcgacctgagcctctgggaaggcgcgcccccctcccctgacgatgtcaccgtcagcaacgcaggtgacacctacttcttcaagggcgcccactactggcgcttccccaagaacagcatcaagaccgagccggacgccccccagcccatggggcccaactggctggactgccccgccccgagctctggtccccgcgcccccaggccccccaaagcgacccccgtgtccgaaacctgcgattgtcagtgcgagctcaaccaggccgcaggacgttggcctgctcccatcccgctgctcctcttgcccctgctggtggggggtgtagcctcccgctgatggggggagccatccagaccgaacagcgccccgcctggccactgcgtctggcattcctgggtcgttagaggacaggcctgactgcgaagctgtgccttgcccctctcccacccgcagtttctcaccccgttctgctcccacaaggcccccctacagtcactgccacactggtggggacctgggacccagacccggaaccagcccagatatcacccctgaggacccatgcgccacgtcctgggtggtggaatcagtggctggagggacgacccttgctctccaggctgttaaccttttccgttgctcccccgccacccacctcctcctccccaggccacccaacttgggcacctccctgggcccagaactgccttccattcaatggggaacccttctatccccaagaaccccttccctgcttgcaccctggagagaacagcttgactcccatcaactcaacgctggtggaaagacagggaccgaaccctggctcaggcctggtcattgcctcctcagcactccctcctgggaggccttagctctagagtgaggggtgggtggaacctgggggcacctcgttcaccctgtccccactccccacagttttaggatctaaatgattgcctctggaactattcttctagactatcccacatcagaatcactgggaaatttaagtttgcagatcccacactcaccctgaatcctcactcagggtggggtcaggaatctgcattttaactagtcgcggggattgtggggggcagtagctggctgtttcgtggcatttctgtggctctgcagtgttcctccaccccaggaccaatatgttcaggccacaccgatggcctgaaccccatgggtagagtcacttaggggccacttcctaagttgctgtccagcctcagtgaccccctagtgcttcctggagctgaggctgtgggcggctgtcccagcaaccaagcgaggggttgccccagttgctcatacaaacagatcagcatgaggacagaaggcaggagactttggtcagttacctgggaattc

SEQ ID NO: 245 - protein, 562 aa, Human
MRLRLRLLALLLLLLAPPARAPKPSAQDVSLGVDWLTRYGYLPPPHPAQAQLQSPEKLRDAIKVMQRFAGLPETGRMDPGTVATMRKPRCSLPDVLGVAGLVRRRRRYALSGSVWKKRTLTWRVRSFPQSSQLSQETVRVLMSYALMAWGMESGLTFHEVDSPQGQEPDILIDFARAFHQDSYPFDGLGGTLAHAFFPGEHPISGDTHFDDEETWTFGSKDGEGTDLFAVAVHEFGHALGLGHSSAPNSIMRPFYQGPVGDPDKYRLSQDDRDGLQQLYGKAPQTPYDKPTRKPLAPPPQPPASPTHSPSFPIPDRCEGNFDAIANIRGETFFFKGPWFWRLQPSGQLVSPRPARLHRFWEGLPAQVRVVQAAYARHRDGRILLFSGPQFWVFQDRQLEGGARPLTELGLPPGEEVDAVFSWPQNGKTYLVRGRQYWRYDEAAARPDPGYPRDLSLWEGAPPSPDDVTVSNAGDTYFFKGAHYWRFPKNSIKTEPDAPQPMGPNWLDCPAPSSGPRAPRPPKATPVSETCDCQCELNQAAGRWPAPIPLLLLPLLVGGVASR

SEQ ID NO: 246 - DNA, 1468 bp, Human
gcgactgtctccgccgagcccccggggccaggtgtcccgggcgcgccacgatgcggccgcggctgtggctcctcctggccgcgcagctgacagttctccatggcaactcagtcctccagcagacccctgcatacataaaggtgcaaaccaacaagatggtgatgctgtcctgcgaggctaaaatctccctcagtaacatgcgcatctactggctgagacagcgccaggcaccgagcagtgacagtcaccacgagttcctggccctctgggattccgcaaaagggactatccacggtgaagaggtggaacaggagaagatagctgtgtttcgggatgcaagccggttcattctcaatctcacaagcgtgaagccggaagacagtggcatctacttctgcatgatcgtcgggagccccgagctgaccttcgggaagggaactcagctgagtgtggttgatttccttcccaccactgcccagcccaccaagaagtccaccctcaagaagagagtgtgccggttacccaggccagagacccagaagggcccactttgtagccccatcacccttggcctgctggtggctggcgtcctggttctgctggtttccctgggagtggccatccacctgtgctgccggcggaggagagcccggcttcgtttcatgaaacagaaattcaatatcgtttgcctgaaaataagtggtttcacaacttgctgttgttttcagattttacaaatgagcagagaatacggttttggtgtcctgctacaaaaagacatcggtcagtaacgagcacgatgtggaaaaatgagagaagggacacattcaaccctggagagttcaatggctgctgaagctgcctgcttttcactgctgcaaggcctttctgtgtgtgatgtgcatgggagcaacttgttcgtgggtcatcgggaatactagggagaaggtttcattgcccccagggcacttcacagagtgtgctggaggactgagtaagaaatgctgcccatgccaccgcttccggctcctgtgctttccctgaactgggacctttagtggtggccatttagccaccatctttgcaggttgctttgccctggtagggcagtaacattgggtcctgggtctttcatggggtgatgctgggctggctccctcttggtcttcccaggctggggctgaccttcctcgcagagaggccaggtgcaggttgggaatgaggcttgctgagaggggctgtccagttcccagaaggcatatcagtctctgagggcttcctttggggccgggaacttgcgggtttgaggataggagttcacttcatcttctcagctcccatttctactcttaagtttctcagctcccatttctactctcccatggcttaatgcttctttcattttctgtttgttttatacaaatgtcttagttgtacaaataaagtcccaggttaaagataaaaaaaa

SEQ ID NO: 247 - DNA, 3915 bp, Human
cccctgctgctctcaagtttcccgttggcgccgcggcccgggcgcttcaggtagcctctcggctctctctgctccgctccgcgcccaggtagggcaccgacgggggctgcacgcggctggccggcttcctccctgctgaggcggccctccctcctcccgcggggccctcctggccggggatccgcagcgctgcgccctctgaacgcccggcccccgcgcctgctgcggggcggggcctggccgggccctggccccggcgggcctcagtgccagcagccccgctccgctctgcccagcgcgtcccctttgctccagccctgcggccgtccctttcggccggcggcatggccctgtcgtccgaacccgctgagatgccgcggcagtttcccaagctgaacatctctgaagtggatgagcaagtccggctcctggcggagaaggtgtttgctaaagtgctccgagaagaggacagcaaagatgccctgtccctgttcactgtcccagaggactgccccatcgggcaaaaggaagccaaggagagggagctgcagaaggagctggcagagcagaagtctgtggagaccgcaaaaagaaagaaaagtttcaagatgattcggtcccagtccctgtctctgcaaatgccgccacagcaagattggaagggccccccggcagccagtccggccatgtctcccacaacccctgtggtcactggagccacttccctgcccacgccagcaccctatgccatgcctgagttccagcgggtcaccatcagcggagattactgtgccgggatcactttggaggactatgagcaggcagccaagagtctggccaaggccctaatgatccgggagaagtatgcgcggctcgcctaccaccgcttcccgcggatcacatcccagtacctgggtcatccgcgggcggatactgcacctccggaagagggccttccagacttccaccctcctccactgccccaggaagacccctactgcctggatgatgcaccccccaacctggattacttggtccacatgcaggggggcatcctctttgtgtatgataacaagaagatgctggagcaccaggagccgcacagcctaccctaccccgacctggagacctacacggtggacatgagccacatcctggctctcatcaccgatggccccacgaaaacctattgtcaccggcgactgaactttctggaatccaagttcagccttcatgagatgttaaacgaaatgtccgagttcaaagagttgaagagtaacccccaccgggacttctataacgtgagaaaggtggacacacacatccatgcggccgcctgcatgaaccaaaagcatctgctgcgcttcatcaagcacacataccagacggagcctgacaggactgtggcagagaagcggggccggaagatcaccctgcggcaggtgtttgacggcctgcacatggacccctacgacctcactgtggactcactggatgtccacgcgggccggcagacattccaccgctttgacaagttcaactccaaatacaaccctgtgggggccagtgagctgcgtgacctgtatttgaaaactgaaaactatctgggaggagagtactttgctcggatggtcaaggaggttgcccgggagctggaggagagcaagtaccagtactcagagccacggctctccatctacggccgcagtcctgaggagtggcccaacctggcctactggttcatccagcacaaggtctactctcccaacatgcgctggatcatccaggtgccccggatttatgacatatttaggtcaaagaagctgctgccaaactttgggaagatgctggagaacatcttcctgccccttttcaaggccactatcaacccccaagatcatcgagagcttcacctcttccttaaatatgtgacggggtttgacagcgtggatgatgagtccaagcacagcgaccacatgttttccgacaagagcccaaacccggacgtctggaccagtgagcagaacccaccctacagctactacctgtactacatgtatgccaacatcatggtgctcaacaacctccgcagggagcgcggcctgagcacgttcctgttccggccgcactgtggggaagccggctccatcacccacctggtgtctgccttcctcactgctgacaacatttcccacgggctgctcctcaagaagagtccggtattgcagtatctctactaccttgctcagatccccattgccatgtctcctcttagcaacaacagtttgttcctcgaatattccaagaaccctctgagggaattcctacacaagggactgcatgtttctctttccaccgatgaccccatgcagttccactacacgaaggaagcacttatggaagaatatgccattgcagctcaagtgtggaagctgagcacctgcgacctgtgtgagatcgccaggaacagcgtgctgcagagcggcctctcgcatcaggaaaagcaaaagtttctgggacaaaattattataaagaaggacctgaaggaaatgatattcgaaagacaaatgtggctcagatccggatggcattccgatatgagaccttatgcaatgagctcagcttcctgtctgatgctatgaaatcagaagagatcaccgccttgaccaactaggtccagcatttgacatgcattttaactttttggttcaatttcaagtctgctgtggctaatagtggtcaagattccgaactaggactttcctctgtgaagaggatgcctctgaagaaattttaaactggtgattttggttgcactgctcactttaagagttaacatgctcacttgttagtatttctgagtaacaagatggtgacttctccttggggatctgggagctgagcacttgtctatacttgttcctaattttccaagtatttctcttgaaactgccagtgcctgaactgttggggccaggattttccctggtcagatgccaagtaacatgtggttttctgccatacttttctccattggcccaggtaggctaattggtagttgttcatttcagcctctggatggctggctgccttaaacacaatcaatttcaaagctccatttcataaaggggctactttgaaggagttaagatggaagacttccttcttgacaaattgtgtttttagtgaatttcttaaaccgttttatttagccctccttccctctttctagttggaagccaaatgtactcatgaaaacagccactcctattctgagtcttggtttcttcacctagaaagtgagggtttggactagatgagtggctttcagggtgttctgtgaatctcctcatgaatactttagggtgggggagggaagggagtgagtgatgctcaggggctgtcaaagtgactgcgttcatcagttttacactggggctgctacataatattttcatttgaacgaagaacttcaaaaagcacaggactagatgatctctgttccttttggctctaatatgctacaactgtaggccaattatcactttaccaattaagagttaggccagataagtgaaatttaacttaagggcacacagctaataagtaataggcctaaactggatttccttattccaaatcctgtcttttccccactattccattagaccccacaaatgttagttgtgtgtgtgtgtgtgtgtgtttttaatcactgtaaccgggtgcatttttttaaggcaaaatttctcccttatctactgtgatgacttcagaagatacaatggtcccaggggccaagtagaaagcatttttaaagattaatctgaattaagctttatcagtgtactctttatctgtgttactagtgcctggtatgtagtaggtgctcaataaatgcatattgaataact

SEQ ID NO: 248 - DNA, 2051 bp, Human
tcatttcatgttatgttttcatttcccctctgtctgagagattgctctgatgtctttccttccataagtcctacggagatcgagcttacctcatttttctcccaggcctaggagctcaattaccaggatcactttcttccccagggtgtactacagacctccacatgttggacagtaggattcagcagagaatgagtcccacatcctcttttcatccataagccactcttcccaactactcttccgccttccattgtccctatgtctactttactgctcaatctggattttggggaacctcctcccaaaaaggcattagaaggaaatgccaagcaccgaaattttgtcaagaagcggaggctcttagaacggagaggctttctgagtaaaaagaaccaaccccctagcaaggcgcctaagttgcactctgaaccttcaaagaaaggggagactcctacggtcgatggcacttggaagaccccttccttcccaaaaaagaagacagctgcttccagcaatgggtcaggacagcccctggacaagaaagctgcagtgtcttggttgacccctgccccttcaaaaaaggctgattctgttgctgctaaagtagatttgctgggggagttccagagtgcccttccaaagatcaatagccacccaacccgctctcagaagaagagctcccagaagaaatcctctaaaaagaaccatcctcagaagaatgccccacagaactccacccaagctcattcagagaataaatgctccggagcatcccagaagttgccacggaagatggtggcaattgactgtgagatggtgggcacaggaccaaaggggcatgttagttccttggctcgatgtagcattgtcaactacaacggagatgtgctttatgacgagtacattcttcccccctgccacattgtggactaccgaaccaggtggagtggtatccggaagcagcacatggtgaatgccacacccttcaagattgctcgaggccagatcttgaagatactcacagggaagatagtggtggggcatgccatccacaacgacttcaaagcccttcagtactttcaccccaaatccctcacccgtgacacctcccatatcccccccctcaaccggaaggctgactgcccggagaatgccaccatgtctctgaagcatctcaccaagaagctgctaaaccgggatatccaggttgggaagagcggacattcctctgtggaagatgcccaggccaccatggagctatataagttggttgaagtcgagtgggaagagcacctagcccggaatccccctacagactagtggcaatggggacgctggtgatatgaggaggcagaggcagcacccaggagaaacagggcagtggaccaatggacagctccaccagctccacatctttggaagctagatttggggagagagaagctctaccccagacttaatacccattgaaatttcacctcaggtgttgtgtcctgtgtctggttaagtgtcccatggaaggggaaagccttcacgtcagaacccaaccctataccttttacttcttaaatggtgctaaccacaggtgtcccagggtgctctgtgccagttaagatttttaactttcaaggggcagggcatactgggaaatgtagtttcccaaactgccttatcacttgggtggacatatgtctccttttatgccttttggtcttgagtaattaacagcatcctcttccacgctcagaagtgttctggttggggccaggcatggtggctcacgcctgtagtcccaacacttagggaggccgaggcgggcggatcacctgagatcaggagttcaagaccagcctggccaacatggcgaattcccgttctctactaaaaatacaaaaaatgtgtggggtgtggtggcaggagcctgtaatcctagctactcaggaggctgaggcaggagaatcgcttgagcccaggaggcggagattgcagtgagccgagatcgtgtcactgcactccagcctgggtgacaagagtgagactccgtctcc

SEQ ID NO: 249 - protein, 353 aa, Human
MSTLLLNLDFGEPPPKKALEGNAKHRNFVKKRRLLERRGFLSKKNQPPSKAPKLHSEPSKKGETPTVDGTWKTPSFPKKKTAASSNGSGQPLDKKAAVSWLTPAPSKKADSVAAKVDLLGEFQSALPKINSHPTRSQKKSSQKKSSKKNHPQKNAPQNSTQAHSENKCSGASQKLPRKMVAIDCEMVGTGPKGHVSSLARCSIVNYNGDVLYDEYILPPCHIVDYRTRWSGIRKQHMVNATPFKIARGQILKILTGKIVVGHAIHNDFKALQYFHPKSLTRDTSHIPPLNRKADCPENATMSLKHLTKKLLNRDIQVGKSGHSSVEDAQATMELYKLVEVEWEEHLARNPPTD

SEQ ID NO: 250 - DNA, 5153 bp, Human
gggcgcagaggaggaaagggagcaggcgcagggggactggaaaggcagcatgcgctcgccaggagcaacctcggcgcccagggtctgaggctgcagccccagttcgccattgtgagccgccgccgggggagtccgctagcgcagccgtgcccccgagtccccgtccgcgcagcgatggggcacctgcccacggggatacacggcgcccgccgcctcctgcctctgctctggctctttgtgctgttcaagaatgctacagctttccatgtaactgtccaagatgataataacatcgttgtctcattagaagcttcagacgtcatcagtccagcatctgtgtatgttgtgaagataactggtgaatccaaaaattatttcttcgaatttgaggaattcaacagcactttgcctcctcctgttattttcaaggccagttatcatggcctttattatataatcactctggtagtggtaaatggaaatgtggtgaccaagccatccagatcaatcactgtgttaacaaaacctctacctgtaaccagtgtttccatatatgactataaaccttctcctgaaacaggagtcctgtttgaaatacattatccagaaaaatataacgttttcacaagagtgaacattagctactgggaaggtaaagacttccggacaatgctatataaagatttctttaagggaaaaacagtatttaatcactggctgccaggaatgtgttatagtaatatcacctttcagctggtatctgaggcaacttttaataaaagtacccttgttgagtacagtggtgtcagtcacgaacccaaacagcacagaactgccccttatccacctcaaaatatttccgttcgtatcgtaaacttgaacaaaaacaactgggaagaacagagtggcaatttcccagaagaatccttcatgagatcacaagatacaataggaaaagaaaaactcttccattttacagaagaaacccctgaaattccctcgggcaacatttcttccggttggcctgattttaatagcagtgactatgaaactacgtctcagccatattggtgggacagtgcatctgcagctcctgaaagtgaagatgaatttgtcagcgtacttcccatggaatacgaaaataacagtacactcagtgagacagagaagtcaacatcaggctctttctcctttttccctgtgcaaatgatattgacctggttaccacccaaaccacccactgcttttgatgggttccatatccatattgaacgagaagagaactttactgaatatttgatggtggatgaagaagcacatgaatttgttgcagaactgaaggaacctgggaaatataagttatctgtgacaacctttagttcctcaggatcttgtgaaactcgaaaaagtcagtcagcaaaatcactcagcttttatatcagtccttcaggagagtggattgaagaactgaccgagaagccgcagcacgtgagtgtccacgttttaagctcaaccactgccttgatgtcctggacatcttcccaagagaactacaacagcaccattgtgtctgtggtgtcgctgacctgccagaaacaaaaggagagccagaggcttgaaaagcagtactgcactcaggtgaactcaagcaaacctattattgaaaatctggttcctggtgcccagtaccaggttgtaatatacctaaggaaaggccctttgattggaccaccttcagatcctgtgacatttgctattgttcccacaggaataaaggatttaatgctctatcctttgggtcctacggccgtggttctgagctggaccagaccttatttaggcgtgttcagaaaatacgtggttgaaatgttttatttcaaccctgctacaatgacatcagagtggaccacctactatgaaatagcagcaactgtttccttaactgcatccgtgagaatagctaatctgctgccagcatggtactacaacttccgggttaccatggtgacgtggggagatccagaattgagctgctgtgacagctctaccatcagcttcataacagccccagtggctccggaaatcacttctgtggaatatttcaacagtctgttatatatcagttggacatatggggatgatacaacggacttgtcccattctagaatgcttcactggatggtggttgcagaaggaaaaaagaaaattaaaaagagtgtaacacgcaatgtcatgactgcaattctcagcttgcctccaggcgacatctataacctctcagtaactgcttgtactgaaagaggaagtaatacctccatgctccgccttgtcaagctagaaccagctccacccaaatcactcttcgcagtgaacaaaacccagacttcagtgactttgctgtgggtggaagagggagtagctgatttctttgaagttttctgtcaacaagttggctccagtcagaaaaccaaacttcaggaaccagttgctgtttcttcccatgtcgtgaccatctccagccttcttcctgccactgcctacaattgtagtgtcaccagctttagccatgacagccccagtgtccctacgttcatagccgtctcaacaatggttacagagatgaatcccaatgtggtagtgatctccgtgctggccatccttagcacacttttaattggactgttgcttgttaccctcattattcttaggaaaaagcatctgcagatggctagggagtgtggagctggtacatttgtcaattttgcatccttagagagggatggaaagcttccatacaactggcgtaggagtatatttgctttcttaaccctgctaccctcatgtctttggactgattatcttttggcattttatattaatccttggagtaaaaatggtttaaagaagaggaaactgacaaacccggttcaactggatgactttgatgcctatattaaggatatggccaaagactctgactataaattttctcttcagtttgaggagttgaaattgattggactggatatcccacactttgctgcagatcttccactgaatcgatgtaaaaaccgttacacaaacatcctaccatatgacttcagccgtgtgagattagtctccatgaatgaagaggaaggtgcagactacatcaatgccaactatattcctggatacaactcaccccaggagtatattgccacccaggggccactgcctgaaaccagaaatgacttctggaagatggtcctgcaacaaaagtctcagattattgtcatgctcactcagtgtaatgagaaaaggagggtgaaatgtgaccattactggccattcacggaagaacctatagcctatggagacatcactgtggagatgatttcagaggaagagcaggacgactgggcctgtagacacttccggatcaactatgctgacgagatgcaggatgtgatgcattttaactacactgcatggcctgatcatggtgtgcccacagcaaatgctgcagaaagtatcctgcagtttgtacacatggtccgacagcaagctaccaagagcaaaggtcccatgatcattcactgcagtgctggcgtgggacggacaggaacattcattgccctggacaggctcttgcagcacattcgggatcatgagtttgttgacatcttagggctggtgtcagaaatgaggtcataccggatgtctatggtacagacagaggagcagtacatttttatccatcagtgtgtgcaactgatgtggatgaagaagaagcagcagttctgcatcagtgatgtcatatacgagaatgttagcaagtcctagttcagaatccggagcagagaggacatgatgtgcgcccatcctcccttgcttccagattgttttagtgggccctgatggtcatttttctaaacagaggccctgctttgtaatatgtggccaaggagataatttatctcacagaagcaccgggaagacttagccttaaagagcctacagtgtccttttggactctttcacttcgggacatttaataatggaccaaattcaacagaacaccaggaaggtcaagacgctctccaaagggcaggaagtacagcacttccgaagagtttagttggccctttgctggttgggctgagttttttatttttaagtgtttgtttttcagtgcaataatttttgtgtgtgtgtgattcttatcagaaagttgaattgttttctgcctacaccgttcatcagccccataacccaggaaggaacaggcattgttagcatcagattatacctcattattaaaaggaggcatggccacacatgaagaaatggtcattctacttcaaagaaattgagccagcactatctgtactccaacattaccggatctggattggggaggttggtcagggaagagaggggttctacccacagatcaactgtgtaatcttttactattcaagctataattcagcttcaaagtagagtagaaaaaaaattgtcttaactgttctagttcttgatggttttcttccttattaacagttggtgtttcttccttggcccttttggactaatgttactgtccaagttctttctcaagaaaccacatctggttcagaagagtgtcaagttggactctttgaactctgttgctgtctgagcaatcgtggtgcctagactttgcattccttgttctgttgacctgcatacatgtgagagctatttctttaagaactatataggctgtgaaaacgcactttctttcccccaaagagctgggaatttatgaagttatggcaatgaactgcagcatgctgggacaattatttgactacttttttttgtaatattgtcaaatgtctctatggattctgacagagatttctttttgttttgttattcttttggttgtcagtttcattttaacgagtgtaactagtaacattttattctttggattttgtataattacagtacatgattgtgtattgtgacatgaatgctgtcaaaatgacattgatggcattgtgaagcctgttactttgtgtcacttcctgataaataagaggtgatgacatggatatacaacagaaaacactttgagttgaaagtaaacacaagctggctgcttccctgtggcaactgtggct

SEQ ID NO: 251 - protein, 1216 aa, Human
MGHLPTGIHGARRLLPLLWLFVLFKNATAFHVTVQDDNNIVVSLEASDVISPASVYVVKITGESKNYFFEFEEFNSTLPPPVIFKASYHGLYYIITLVVVNGNVVTKPSRSITVLTKPLPVTSVSIYDYKPSPETGVLFEIHYPEKYNVFTRVNISYWEGKDFRTMLYKDFFKGKTVFNHWLPGMCYSNITFQLVSEATFNKSTLVEYSGVSHEPKQHRTAPYPPQNISVRIVNLNKNNWEEQSGNFPEESFMRSQDTIGKEKLFHFTEETPEIPSGNISSGWPDFNSSDYETTSQPYWWDSASAAPESEDEFVSVLPMEYENNSTLSETEKSTSGSFSFFPVQMILTWLPPKPPTAFDGFHIHIEREENFTEYLMVDEEAHEFVAELKEPGKYKLSVTTFSSSGSCETRKSQSAKSLSFYISPSGEWIEELTEKPQHVSVHVLSSTTALMSWTSSQENYNSTIVSVVSLTCQKQKESQRLEKQYCTQVNSSKPIIENLVPGAQYQVVIYLRKGPLIGPPSDPVTFAIVPTGIKDLMLYPLGPTAVVLSWTRPYLGVFRKYVVEMFYFNPATMTSEWTTYYEIAATVSLTASVRIANLLPAWYYNFRVTMVTWGDPELSCCDSSTISFITAPVAPEITSVEYFNSLLYISWTYGDDTTDLSHSRMLHWMVVAEGKKKIKKSVTRNVMTAILSLPPGDIYNLSVTACTERGSNTSMLRLVKLEPAPPKSLFAVNKTQTSVTLLWVEEGVADFFEVFCQQVGSSQKTKLQEPVAVSSHVVTISSLLPATAYNCSVTSFSHDSPSVPTFIAVSTMVTEMNPNVVVISVLAILSTLLIGLLLVTLIILRKKHLQMARECGAGTFVNFASLERDGKLPYNWRRSIFAFLTLLPSCLWTDYLLAFYINPWSKNGLKKRKLTNPVQLDDFDAYIKDMAKDSDYKFSLQFEELKLIGLDIPHFAADLPLNRCKNRYTNILPYDFSRVRLVSMNEEEGADYINANYIPGYNSPQEYIATQGPLPETRNDFWKMVLQQKSQIIVMLTQCNEKRRVKCDHYWPFTEEPIAYGDITVEMISEEEQDDWACRHFRINYADEMQDVMHFNYTAWPDHGVPTANAAESILQFVHMVRQQATKSKGPMIIHCSAGVGRTGTFIALDRLLQHIRDHEFVDILGLVSEMRSYRMSMVQTEEQYIFIHQCVQLMWMKKKQQFCISDVIYENVSKS

SEQ ID NO: 252 - DNA, 1866 bp, Human
agcccctaaagcagcactaattgcaaggatttctcaggtgactggttagtatgtggtgtcaatcatgaaaaagaagaactgcacgaaagtatctttctgaaaacttgcaaaactgagaagctagtctgtttaaaacaggaagttatatacttacattgtttactactttactaatgtctgtgatctgatggtatctctgtttcaggagtggtgacgcctaagctatcactggacatatcaaggacttcactaaattagcaggtaccactggtcttcttgtgcttatccgggcaagaacttatcgaaatacaatagaagtttttacttagaagagattttcagggagaagtgaaatgacaacctcactagatacagttgagacctttggtaccacatcctactatgatgacgtgggcctgctctgtgaaaaagctgataccagagcactgatggcccagtttgtgcccccgctgtactccctggtgttcactgtgggcctcttgggcaatgtggtggtggtgatgatcctcataaaatacaggaggctccgaattatgaccaacatctacctgctcaacctggccatttcggacctgctcttcctcgtcacccttccattctggatccactatgtcagggggcataactgggtttttggccatggcatgtgtaagctcctctcagggttttatcacacaggcttgtacagcgagatctttttcataatcctgctgacaatcgacaggtacctggccattgtccatgctgtgtttgcccttcgagcccggactgtcacttttggtgtcatcaccagcatcgtcacctggggcctggcagtgctagcagctcttcctgaatttatcttctatgagactgaagagttgtttgaagagactctttgcagtgctctttacccagaggatacagtatatagctggaggcatttccacactctgagaatgaccatcttctgtctcgttctccctctgctcgttatggccatctgctacacaggaatcatcaaaacgctgctgaggtgccccagtaaaaaaaagtacaaggccatccggctcatttttgtcatcatggcggtgtttttcattttctggacaccctacaatgtggctatccttctctcttcctatcaatccatcttatttggaaatgactgtgagcggagcaagcatctggacctggtcatgctggtgacagaggtgatcgcctactcccactgctgcatgaacccggtgatctacgcctttgttggagagaggttccggaagtacctgcgccacttcttccacaggcacttgctcatgcacctgggcagatacatcccattccttcctagtgagaagctggaaagaaccagctctgtctctccatccacagcagagccggaactctctattgtgttttaggtcagatgcagaaaattgcctaaagaggaaggaccaaggagatgaagcaaacacattaagccttccacactcacctctaaaacagtccttcaaacttccagtgcaacactgaagctcttgaagacactgaaatatacacacagcagtagcagtagatgcatgtaccctaaggtcattaccacaggccaggggctgggcagcgtactcatcatcaaccctaaaaagcagagctttgcttctctctctaaaatgagttacctacattttaatgcacctgaatgttagatagttactatatgccgctacaaaaaggtaaaactttttatattttatacattaacttcagccagctattgatataaataaaacattttcacacaatacaataagttaactattttattttctaatgtgcctagttctttccctgcttaatgaaaagctt

SEQ ID NO: 253 - DNA, 2354 bp, Human
gggaggaccccaatctaggcccaagagggaaaggccacgtgcctgtatgagcgtatgagcatgtgcatgcgcgtgtgtgcacagggtggtgcacctggcaggggtccttgagtgaggcatgccccattctgtagcagggaacctggaatgggctgtgtgttctgcaagaaattggagccggtggccacggccaaggaggatgctggcctggaaggggacttcagaagctacggggcagcagaccactatgggcctgaccccactaaggcccggcctgcatcctcatttgcccacatccccaactacagcaacttctcctctcaggccatcaaccctggcttccttgatagtggcaccatcaggggtgtgtcagggattggggtgaccctgttcattgccctgtatgactatgaggctcgaactgaggatgacctcaccttcaccaagggcgagaagttccacatcctgaacaatactgaaggtgactggtgggaggctcggtctctcagctccggaaaaactggctgcattcccagcaactacgtggcccctgttgactcaatccaagctgaagagtggtactttggaaagattgggagaaaggatgcagagaggcagctgctttcaccaggcaacccccagggggcctttctcattcgggaaagcgagaccaccaaaggtgcctactccctgtccatccgggactgggatcagaccagaggcgatcatgtgaagcattacaagatccgcaaactggacatgggcggctactacatcaccacacgggttcagttcaactcggtgcaggagctggtgcagcactacatggaggtgaatgacgggctgtgcaacctgctcatcgcgccctgcaccatcatgaagccgcagacgctgggcctggccaaggacgcctgggagatcagccgcagctccatcacgctggagcgccggctgggcaccggctgcttcggggatgtgtggctgggcacgtggaacggcagcactaaggtggcggtgaagacgctgaagccgggcaccatgtccccgaaggccttcctggaggaggcgcaggtcatgaagctgctgcggcacgacaagctggtgcagctgtacgccgtggtgtcggaggagcccatctacatcgtgaccgagttcatgtgtcacggcagcttgctggattttctcaagaacccagagggccaggatttgaggctgccccaattggtggacatggcagcccaggtagctgagggcatggcctacatggaacgcatgaactacattcaccgcgacctgagggcagccaacatcctggttggggagcggctggcgtgcaagatcgcagactttggcttggcgcgtctcatcaaggacgatgagtacaacccctgccaaggttccaagttccccatcaagtggacagccccagaagctgccctctttggcagattcaccatcaagtcagacgtgtggtcctttgggatcctgctcactgagctcatcaccaagggccgaatcccctacccaggcatgaataaacgggaagtgttggaacaggtggagcagggctaccacatgccgtgccctccaggctgcccagcatccctgtacgaggccatggaacagacctggcgtctggacccggaggagaggcctaccttcgagtacctgcagtccttcctggaggactacttcacctccgctgaaccacagtaccagcccggggatcagacatagcctgtccgggcatcaaccctctctggcggtggccaccagtccttgccaatccccagagctgttcttccaaagcccccaggctggcttagaaccccatagagtcctagcatcaccgaggacgtggctgctctgacaccacctagggcaacctacttgttttacagatggggcaaaaggaggcccagagctgatctctcatccgctctggccccaagcactatttcttccttttccacttaggcccctacatgcctgtagccctttctcactccatccccacccaaaagtgctcagaccttgtctagttatttataaactgtatgtacctccctcacttctctcctatcactgctttcctactctccttttatctcactctagtccaggtgccaagaatttcccttctaccctctattctcttgtgtctgtaagttacaaagtcaggaaaagtcttggctggacccctttcctgctgggtggatgcagtggtccaggactggggtctgggcccaggtttgagggagaagtttgcagagcacttcccacctctctgaatagtgtgtatgtgttgatttattgattctgtaaataagtaaaatgacaatatgaatcctcca

SEQ ID NO: 254 - protein, 529 aa, Human
MGCVFCKKLEPVATAKEDAGLEGDFRSYGAADHYGPDPTKARPASSFAHIPNYSNFSSQAINPGFLDSGTIRGVSGIGVTLFIALYDYEARTEDDLTFTKGEKFHILNNTEGDWWEARSLSSGKTGCIPSNYVAPVDSIQAEEWYFGKIGRKDAERQLLSPGNPQGAFLIRESETTKGAYSLSIRDWDQTRGDHVKHYKIRKLDMGGYYITTRVQFNSVQELVQHYMEVNDGLCNLLIAPCTIMKPQTLGLAKDAWEISRSSITLERRLGTGCFGDVWLGTWNGSTKVAVKTLKPGTMSPKAFLEEAQVMKLLRHDKLVQLYAVVSEEPIYIVTEFMCHGSLLDFLKNPEGQDLRLPQLVDMAAQVAEGMAYMERMNYIHRDLRAANILVGERLACKIADFGLARLIKDDEYNPCQGSKFPIKWTAPEAALFGRFTIKSDVWSFGILLTELITKGRIPYPGMNKREVLEQVEQGYHMPCPPGCPASLYEAMEQTWRLDPEERPTFEYLQSFLEDYFTSAEPQYQPGDQT

SEQ ID NO: 255 - DNA, 3166 bp, Human
ggcgcggcaggaggacgaggcagggcgggcgggcgctctaagggttctgctctgactccaggttgggacagcgtcttcgctgctgctggatagtcgtgttttcggggatcgaggatactcaccagaaaccgaaaatgccgaaaccaatcaatgtccgagttaccaccatggatgcagagctggagtttgcaatccagccaaatacaactggaaaacagctttttgatcaggtggtaaagactatcggcctccgggaagtgtggtactttggcctccactatgtggataataaaggatttcctacctggctgaagctggataagaaggtgtctgcccaggaggtcaggaaggagaatcccctccagttcaagttccgggccaagttctaccctgaagatgtggctgaggagctcatccaggacatcacccagaaacttttcttcctccaagtgaaggaaggaatccttagcgatgagatctactgcccccctgagactgccgtgctcttggggtcctacgctgtgcaggccaagtttggggactacaacaaagaagtgcacaagtctgggtacctcagctctgagcggctgatccctcaaagagtgatggaccagcacaaacttaccagggaccagtgggaggaccggatccaggtgtggcatgcggaacaccgtgggatgctcaaagataatgctatgttggaatacctgaagattgctcaggacctggaaatgtatggaatcaactatttcgagataaaaaacaagaaaggaacagacctttggcttggagttgatgcccttggactgaatatttatgagaaagatgataagttaaccccaaagattggctttccttggagtgaaatcaggaacatctctttcaatgacaaaaagtttgtcattaaacccatcgacaagaaggcacctgactttgtgttttatgccccacgtctgagaatcaacaagcggatcctgcagctctgcatgggcaaccatgagttgtatatgcgccgcaggaagcctgacaccatcgaggtgcagcagatgaaggcccaggcccgggaggagaagcatcagaagcagctggagcggcaacagctggaaacagagaagaaaaggagagaaaccgtggagagagagaaagagcagatgatgcgcgagaaggaggagttgatgctgcggctgcaggactatgaggagaagacaaagaaggcagagagagagctctcggagcagattcagagggccctgcagctggaggaggagaggaagcgggcacaggaggaggccgagcgcctagaggctgaccgtatggctgcactgcgggctaaggaggagctggagagacaggcggtggatcagataaagagccaggagcagctggctgcggagcttgcagaatacactgccaagattgccctcctggaagaggcgcggaggcgcaaggaggatgaagttgaagagtggcagcacagggccaaagaagcccaggatgacctggtgaagaccaaggaggagctgcacctggtgatgacagcacccccgcccccaccaccccccgtgtacgagccggtgagctaccatgtccaggagagcttgcaggatgagggcgcagagcccacgggctacagcgcggagctgtctagtgagggcatccgggatgaccgcaatgaggagaagcgcatcactgaggcagagaagaacgagcgtgtgcagcggcagctgctgacgctgagcagcgagctgtcccaggcccgagatgagaataagaggacccacaatgacatcatccacaacgagaacatgaggcaaggccgggacaagtacaagacgctgcggcagatccggcagggcaacaccaagcagcgcatcgacgagttcgaggccctgtaacagccaggccaggaccaagggcagaggggtgctcatagcgggcgctgccagccccgccacgcttgtgtctttagtgctccaagtctaggaactccctcagatcccagttcctttagaaagcagttacccaacagaaacattctgggctgggaaccagggaggcgccctggtttgttttccccagttgtaatagtgccaagcaggcctgattctcgcgattattctcgaatcacctcctgtgttgtgctgggagcaggactgattgaattacggaaaatgcctgtaaagtctgagtaagaaacttcatgctggcctgtgtgatacaagagtcagcatcattaaaggaaacgtggcaggacttccatctgtgccatacttgttctgtattcgaaatgagctcaaattgattttttaatttctatgaaggatccatctttgtatatttacatgcttagaggggtgaaaattattttggaaattgagtctgaagcactctcgcacacacagtgattccctcctcccgtcactccacgcagctggcagagagcacagtgatcaccagcgtgagtggtggaggaggacacttggatttttttttttgttttttttttttttgcttaacagttttagaatacattgtacttatacaccttattaatgatcagctatatactatttatatacaagtgataatacagatttgtaacattagttttaaaaagggaaagttttgttctgtatattttgttaccttttacagaataaaagaattacatatgaaaaaccctctaaaccatggcacttgatgtgatgtggcaggagggcagtggtggagctggacctgcctgctgcagtcacgtgtaaacaggattattattagtgttttatgcatgtaatggactatgcacacttttaattttgtcagattcacacatgccactatgagctttcagactccagctgtgaagagactctgtttgcttgtgtttgtttgtttgcagtctctctctgccatggccttggcaggctgctggaaggcagcttgtggaggccgttggttccgcccactcattccttctcgtgcactgctttctccttcacagctaagatgccatgtgcaggtggattccatgccgcagacatgaaataaaagctttgcaaaggcacgaaaaaaaaaaaaaaaaaaaaaaaaaaaaaaaaaaaaaaaaaaaaaaaaaaaaaaaaaaaaaaaaaaaaaaaaaaaaaaaaaaaaaaaaaaaaaaaaaaaaaaa

SEQ ID NO: 256 - protein, 586 aa, Human
MPKPINVRVTTMDAELEFAIQPNTTGKQLFDQVVKTIGLREVWYFGLHYVDNKGFPTWLKLDKKVSAQEVRKENPLQFKFRAKFYPEDVAEELIQDITQKLFFLQVKEGILSDEIYCPPETAVLLGSYAVQAKFGDYNKEVHKSGYLSSERLIPQRVMDQHKLTRDQWEDRIQVWHAEHRGMLKDNAMLEYLKIAQDLEMYGINYFEIKNKKGTDLWLGVDALGLNIYEKDDKLTPKIGFPWSEIRNISFNDKKFVIKPIDKKAPDFVFYAPRLRINKRILQLCMGNHELYMRRRKPDTIEVQQMKAQAREEKHQKQLERQQLETEKKRRETVEREKEQMMREKEELMLRLQDYEEKTKKAERELSEQIQRALQLEEERKRAQEEAERLEADRMAALRAKEELERQAVDQIKSQEQLAAELAEYTAKIALLEEARRRKEDEVEEWQHRAKEAQDDLVKTKEELHLVMTAPPPPPPPVYEPVSYHVQESLQDEGAEPTGYSAELSSEGIRDDRNEEKRITEAEKNERVQRQLLTLSSELSQARDENKRTHNDIIHNENMRQGRDKYKTLRQIRQGNTKQRIDEFEAL

SEQ ID NO: 257 - DNA, 1411 bp, Human
aagatggctgtggagctgggcgtgctgctcgtccggccccggcccggaaccgggctgggtagagtgatgcggaccctcctgctggtgctgtggctggcgacgcgcggaagcgcgctctactttcacatcggagagacggagaagaagtgctttattgaggagatcccggacgagaccatggtcataggaaactaccggacgcagctgtatgacaagcagcgggaggagtaccagccggccaccccggggcttggcatgtttgtggaggtgaaggacccagaggacaaggtcatcctggcccggcagtatggctccgagggcaggttcactttcacttcccatacccctggtgagcaccagatctgtcttcactccaattccaccaagttctccctctttgctggaggcatgctgagagttcacctggacatccaggtaggtgaacatgccaatgactatgcagaaattgctgctaaagacaagttgagtgagttgcagctacgagtgcgacagctggtggaacaagtggagcagatccagaaagagcagaactaccagcggtggcgagaggagcgcttccggcagaccagtgagagcaccaaccagcgggtgctgtggtggtccattctgcagaccctcatcctcgtggccatcggtgtctggcagatgcggcacctcaagagcttctttgaagccaagaagcttgtgtagctgtcccaggtgtcacaacccatcctcccaggctgggggagaaaggacctcctggaactgacttcttctgtcaggaggactggtttccagccatacctgttctggaagggagaggggctggaggcacccacaggcacaagctgaaggcagcagcttggctaatactgagcaggtagtggggcaaattcctgccctctctctctggcctctgggccgtttggtagtaatcacccaggggctggtaaagcccctcctcttggcacctcagaatcacagtgttactgatcagggatgtgaggctgctgttgggggtggggggaggggaatgggcaggcaagccagtcttctgtcttcctttgctaacttagggttttgagcaggttggggtatggtgcctgtcatacccacctgccaccctgggaacctcactgttctctctttcagcctagacctgctgatccagggtgtgtgtgagttgagggtgggtggaggggtttgcagtgtgggaatgtggccctgcagttgacctgagctgcttcacatggttgtccattctggggcttaaagaactgggaccagaccaagtagaggccttggtgctggttggggtggggcctgcagagtcttagttactgatttcattttcaataaatgtaggtttgttacatgagtttcccaataaaaaaaaaaaaaaaaaaaa

SEQ ID NO: 258 - DNA, 2185 bp, Human
agcggcgcagggcaccatgggaaacggacggaagctccattgagccaaataagttggccacgtggggcggaacggaaacctcgcagggtcagaccgtagcgacgcgggaagtccggacgcagtagctccctgaagcggaggcgaaggggagtttaagccccagcggcggcaatggcggagaggcccgaggacctaaacctgcccaatgccgtgatcaccaggatcatcaaggaggcgctcccggacggtgtcaacatctccaaggaggcccggagcgccatctcccgcgccgccagcgtcttcgtgctgtacgccacatcctgtgctaacaactttgcaatgaaaggaaagcggaagacgctgaatgccagtgatgtgctctcagccatggaagagatggagttccagcggttcgttatcccattgaaagaagctctggaagcatataggcgggagcagaaaggcaagaaggaggcctcagagcaaaagaagaaggacaaagacaaaaaaacagactcggaagagcaagacaagagcagggatgaggacaatgatgaagacgaagaaaggctggaagaagaagaacagaatgaagaggaagaagtagacaactgaaaagggcgggagactgtggcaccttggaaggtaccacttgaaatgagacgtgctacgtgtttctgtgaagcttttccatgctgggcagagtagtctcaggcaaaagtgcctgaaaagatcagaataaaaactgactagaaataccgtcaaaaccagcacttaccaaactcagagcatctgagtagcagaatcctgttttgcttcatcaatctgaaggttatggccttttgacaagagggattctgaacgactaaattagtcagtttgctcgcttttgtttacttaaatgtatggttagatggtttttgatctgcagtcttccctagtcccccaaataagtaataataacttccatgctgcctgctgtgttccagatcacagaggcagccaaggctcaggaaaaactggggctttgcttatggtcagcctatgtttgattgcacagtctttgacaatagtagcttactaagactgctcagaatgagtaagctttaggaaactactaaaatgctgtgggagaataacaaaatccgttctctctcttcacttgacagaagcattaactgaattttgtttttcatagacccacttggcccaaaacctttctatattgcctgtagatgatcggcctgctggtgtggtagtaatctgatcacagatattcttaaatcagcagtgtggaatggtattagtcaaacatggtgccagtgtcttttacaaaaacagatggcatagtgtcagatgtaccttactctctgctactgtacagctttaggatttgtcatcacctcccggaaggtgtaaaaccccaggcttcctcttcttgtagtccatctcccagacttgtgactatggcttttcattcttcaattcatgacgagtgccaaacttgattttctctaggcacagctttctccctctgtgcctcctgcttcctttctctctcctgcctctcctctgctccccatcccactttctcatctgcctccttttctcacttctgtcagtctgtaagctttgataacctgcttaatactccaaagtgtgagttcctctgatctcttgattccttagttctaatctcacgttttgtttttaagagatggagtctctcactctgtggcccaggctggagtgcagtggcatgatcatagctcattgcatccttgaaatcctgggctcaggtgatcctcccgcctgagcctcctgagtatctgggactacagatgcgtgccaccaagcctggctaattttgtctcatgtcttctaaaaattattttgtgaagccccttcacaaaaaaccttaagggaaatctgatggtgctcaggaatctaactctccctaaaccatcctctttaactgcttctaaaatatctctgttggcctttcttagcctttttctgtttccattcagtgctccaagcgctttttgtttctaagttgagtgcttggggtttgacaggtagtgacgtgtagtttgacactgttaacttgttaaatacagtgaaaagtttgtgagtgaagaatgctgagaagattgtaatgctttgtacaaataaaagtcttgtt

SEQ ID NO: 259 - DNA, 1576 bp, Human
atgtgtgataacggagaactggaagacaagcctccagcacctcccgtgcgaatgagcaggaccatctttagcactggaggcaaagaccctttgtcagccaatcacagtttgaaacctttgccttctgttccagaggagaaaaagcccaggcataaaatcatctccatattctcaggcacagagaaaggaagtaaaaagaaagaaaaggaacggccagaaatttctcctccatctgattttgaacacaccatccatgttggctttgatgctgttactggagaattcactggcatgccagaacactgggctcgattactacagacctcaaatatcaccaaactagagcaaaagaagaatcctcaggctgtgctggatgtcttaaagttctacgactccaacacagtgaagcagaagtatctgagttttactcctcctgagaaagatggcttcccttctggaacaccagcactgaatgccgagggaacagaagcacctgcagtagtgacagaggaggaggacgatgatgaagagactgcccctcccgttattgccccaccaccggatcatatgaaatcaatttacacacggtctgtaattgaccctgttcctgcaccagttggtgattcaaatgttgatggtggtgccaagtctttagacaaacagaaaaagaagactaagatgacagatgaagagattatggagaaactaagaactattgtgagcataggtgaccctaagaaaaaaatatacaagatatgaaaaaattggacaaggggcttctggtacagttttcactgctaccgacgttgcactgggacagaaggttgctatcaaacaaattaatttacagaaacagccaaagaaggaattgatcattaatgagattctggtaatgaaagaattaaaaaatcccaacatagttaacttcttggacagttacctggtaggagatgaattgtttgtggtcgtggaataccttgctagggggtcactcactgatgtggtaacagaaacctgcatggatgaagcacagattgctgctgtatgcagagagagtttacaggcattggagtttttacatgctaatcaagtgatccacagagacatcaaaagtgacagtgtacttttgggaatggaaggatcagttaagctcactgactttggtttctgtgcccagatcacccctgagcagagcaaacgcagtaccgtggtcagaacgccacactggatggcaccagaagtggttacacggaaggcttatggccctaaagtcaatgtatggtctctgggtatcatggctactgagatggtagaaggagagcctccatacctcaatgaaaatcccttgagggccttgtgcctaatagcaactaatggaatcccagaacttcagaatccagagacactttccccaatatttcgggatttcttaaatcgatgtttggaaacagatgtggaaaaaaggggttcagccaaagaattattacagcatcttttcctgaaactagccaaactgttatctagcttgacaccactgatcatggcagctaaagaagcaatgaagagtaaccgttaa

SEQ ID NO: 260 - DNA, 2394 bp, Human
gaattccgggctcggagcctcggcggaccttgctgcctctgtctctttaacgcgagaggaagcgatgcagaggggtggaaaatggcagagctgcagatgttactagaggaggagatcccgtctggcaagagggcgctgatcgagagttaccagaacctgactcgggtggcagactactgtgaaaacaactacatacaggctacagacaagagaaaagctttagaggagaccaaagcctatacaacccaatctctagctagtgttgcttatcaaataaatgcattggccaacaatgtactccagttgctggatatccaagcctctcagcttcggagaatggagtcttccatcaatcatatctcacagactgtggatattcataaggagaaagtggcacgaagagagattggtattttgacaacaaataagaatacatcaagaactcacaaaataatagcacctgcgaatatggagcgccctgtaaggtatattcggaaacctatcgattacacagttctggatgatgtgggccatggtgtcaagtggctaaaagccaagcatggaaataaccagcctgcaagaactggcacactgtcgagaacaaatcctcttactcagaaaccgccaagtcctcccatgtcaggccggggaacactgggacggaatactccttataaaaccctggaacctgttaaacccccaacagttcctaatgactatatgaccagtcctgctaggcttggaagtcagcatagtccaggcaggacagcatctttaaatcagagaccaaggacacacagtggaagtagtggaggaagtggaagtcgagaaaacagtggtagcagtagtattggcattcccattgctgtgcctacaccttcgccacccactattggaccagaaaacatttctgtccctcctccttctggagctccaccagcaccacctctggcaccacttctcccagtgagcactgtgatagcagccccgggctcagctcctggttcccagtatggcacaatgaccaggcagatatctcgacacaactctactacttcttcgacatcttctggtggatacagacgaactccctctgtgactgctcaattttctgctcagcctcatgttaatggaggtccactttattctcaaaattcaatttctattgctccaccccctccccctatgcctcagttgactccacagatacctctcacaggcttcgtggccagggtgcaggaaaacattgctgatagtccaactccaccgccaccacctccaccagatgacattcccatgtttgatgactttccacctcccccaccaccaccaccagtggattatgaagatgaggaggctgcagtagttcagtataatgatccatatgcagatggggatcctgcttgggcccccaagaattatattgagaaagttgttgcaatatatgattatacaaaagacaaggatgatgagctgtcatttatggagggtgcaatcatttatgttataaagaagaatgatgatggctggtatgaaggagtctgcaatcgagtgactggtctgttccctgggaactatgttgaatcaatcatgcactatactgattaatttttttttttcttttgaagtagattcttattactcagtcatactgtgggactattatggttaacagaactgtcttaatatgttttaaaatgtgcccatattttcagaacatgctgttttattggtaaattgaatgtctacctgtaagcataaatctttgaggcagtttatgtattgctgaatagcaatttatacaagaagctgtccataactgattatgcttatgtacttacttacacatttttaactttatgaccagcctaaatattctggggggagtggggtataatatttaacgaatcatgattcaggttgtaccattacatgtttcagtgcagcatggttactaacgctatgtcagactaatattaaaatcagaaaatttaaatgctggtgctggtcagactttttttgttagattctctcatttaaaaaaaatactgtttgtttaaagcatgcataaaaatttatgtattgaaatatacttaaaaattcaagatgcttcccatttgtgtaatatttacctggaggactccgtacttaggtgtcttaacgtggattgggtttcccaggtttccatgtggaacaagccaaaagaggattatttgtaatgttgtaatttgtacctaagttttttaatgagtggaatttgcattataaactttttccatttataaaaacataagtggacccaaggtttttgtcctttccttcactgatttgcttttaaaaaaataaaagataatgatttattggaaaaaaaaaaaaaaaaaaaaaaaaaaaaaa

SEQ ID NO: 261 - protein, 508 aa, Human
MAELQMLLEEEIPSGKRALIESYQNLTRVADYCENNYIQATDKRKALEETKAYTTQSLASVAYQINALANNVLQLLDIQASQLRRMESSINHISQTVDIHKEKVARREIGILTTNKNTSRTHKIIAPANMERPVRYIRKPIDYTVLDDVGHGVKWLKAKHGNNQPARTGTLSRTNPLTQKPPSPPMSGRGTLGRNTPYKTLEPVKPPTVPNDYMTSPARLGSQHSPGRTASLNQRPRTHSGSSGGSGSRENSGSSSIGIPIAVPTPSPPTIGPENISVPPPSGAPPAPPLAPLLPVSTVIAAPGSAPGSQYGTMTRQISRHNSTTSSTSSGGYRRTPSVTAQFSAQPHVNGGPLYSQNSISIAPPPPPMPQLTPQIPLTGFVARVQENIADSPTPPPPPPPDDIPMFDDFPPPPPPPPVDYEDEEAAVVQYNDPYADGDPAWAPKNYIEKVVAIYDYTKDKDDELSFMEGAIIYVIKKNDDGWYEGVCNRVTGLFPGNYVESIMHYTD

SEQ ID NO: 262 - DNA, 6334 bp, Human
ttctgtgaacatttggaattctgtattcaaatctattttgaccattcccaagtgattttgaaggtctttggcatgtcataatttgttattttgtcaaggccagtgtttgggtgtgagagtggtgcacagggcaggagtgtgtaactttgttaggaagtgagcctagccacaccctcctgagtcactggttctttactatcctggggtaggcaatatcttttgttcagctgataaaagctttgtcattgtgaagattggctcccaatgataggaaactgctggtgatgaaaataaaggggtcttaaagattattctcagccagaaaaaataagtgttagacaaattaaatggaaaataattaatattttagtagtctttacaatttggaggtctaaggctctgtcagcatgggttctttaaggtcaaggatctaggatacacatgcacaggaaaaaagactggaagtatgctaagcagtgactatctctgaatgattgtgaaaaaatttaggatgaataagcagaaaaaaacaataaatgacaaaatataacaatggagttttcttgacaatgaaattctcttaaacttaaatctctttaattaggcaggtaaactattttatcatcttcgtttgacctggcccttcttttcaatgttaacagaagccatgcagtgacacccgctaagacttgttggtagccatgtcggagccccacagggtccagttcacctctctcccaggttccctgaatcctgcgtttttgaagaagtcccggaaggaggaggctggggcaggagaacagcatcaggactgtgagccggctgcagcagctgttcggattacactcaccctctttgaaccagatcacaaacgctgcccagagttcttctacccagagctggtgaagaatatccgagggaaggtaaaaggccttcagcctggagataagaagaaagatctgtcagatcctttcaatgacgaagaaaaggaaaggcataaagtagaggcccttgcccgaaaatttgaagaaaaatacggtggaaagaaacgtagaaaagaccgaatacaggacttgatcgatatggggtatggttatgatgaatccgactccttcatcgataactctgaggcgtatgatgagcttgttcctgcttctttgactacgaagtatggaggattttacattaactcgggaaccctgcagtttagacaagcatcagagtctgaagatgacttcattaaagaaaagaagaaaaaatctccaaagaagcggaagttgaaggaaggtggtgagaagataaagaagaagaaaaaagatgacacttatgacaaggagaagaaatcgaaaaagtccaagttttccaaagccggcttcacagccctcaatgccagtaaggagaagaagaagaagaaatattctggggctttaagcgttaaagagatgctaaagaaatttcagaaagagaaagaggctcagaaaaaaagggaggaggagcataagcctgttgcggtcccatcagcggaagttcagggcctgcgggaactggagggtgcctctgaccccttgctctcactctttggctctacttctgacaacgacttgctccaggcggccactgccatggactcgctgacggatttggacttggagcatctgctcagtgagtctccagaaggaagtcccttccgagatatggatgatggaagtgattcccttggggtgggattggaccaggaattcaggcagccctcttctctccccgaaggcctgccagcacccctggagaagcgcgttaaggagctggctcaggctgccagagctgctgagggggagagcagacagaagttcttcacccaggatattaatggaatcctattagacatagaggcgcagactcgggagctgagcagtcaggtccgctctggggtgtatgcctatcttgcgtcattcctgccctgcagcaaggatgccctgctcaagcgtgctcggaaacttcacctctatgaacaggggggccgtctgaaggagcctctccagaagctcaaggaagccattggcagggcgatgccagagcagatggccaagtaccaggacgaatgccaggcacacacgcaggcaaaggttgccaagatgctggaagaggagaaagacaaggagcagagggaccggatttgttcggatgaggaagaagatgaagaaaaagggggcaggaggataatgggacctcggaagaagttccaatggaatgatgagatcagggagctactgtgccaggtggtgaagatcaaactggagagccaggacctggagaggaacaacaaagcccaggcttgggaggactgtgtgaagggctttctggatgcggaagtcaagcccctctggcccaaaggctggatgcaggccagaactctgtttaaggagagcagacgaggccatgggcacctgacttcaatcctggccaagaagaaagttatggccccttctaaaatcaaggtgaaggagtcgtctacgaagcctgataaaaaggtttctgtcccatcaggacagattggtggccccattgctttgccctcagatcaccaaacaggaggcctgagtattggggcctcgagcagggagctcccatcccaggcatcgggcggccttgctaaccctcctcctgtcaacctggaggactcattggatgaagacttgatccgcaatccagcctcctcggtggaagccgtgtccaaggaattggctgcattgaatagcagagcagctgggaactctgaattcacactgcctgcaccctcaaaagcacctgcagaaaaagttggaggcgttttatgtacagaagaaaaaaggaacttggcgaagcctagtccttctgctccaccaccagctagctctctgcagtcacccctcaattttctggcagaacaggctctggcactggggcagtcctctcaggagaaaaaaccagagagttctggctacaaagagctgtcctgccaggctcccctcaataagggcctgccagaagtacatcagtccaaagctaagcaccacagcttgccacggacgtctcacgggccccaagtggcagttcctgtgcctggcccccaggtcaaagtctttcatgccggcactcagcagcagaaaaacttcacgcccccatctccatttgccaataagctccaaggcccaaaggcttctcccacacagtgtcatcgttccctcctgcagttagtgaagacagcggccaaaggccagggcttccatccctctgcaccagccacctcaggaggcctgtcagcctccagcagcagctctcacaagaccccagcctcgtcctcttctgccctgagccatccagcaaagccacattcagtcagctctgcaggctcatcttacaagaataatccctttgccagctcaatctccaaacatggggtttcttctggcagctcttcctcgggaggaacaccagtccagagttctgtttctgggagcctggtccctggcatacagcctccctccgtgggacagcccaccagccgacccgtcccaagttcagcagggaaaaaaatgcctgtttcccagaagttgactctggtagcccctccaggcggtccaaacggagattccagtggtgggacccagggagtggcaaagttgctgacctcgccgtccctaaagccctctgcagttagtagtgtgacatcgtctacctccttgtcaaaaggagcgagtgggactgtgctgctggccggctcctctttgatggcttcaccctacaaatccagcagcccaaagctgtctggggccatgagctcgaactccttgggaattataacccctgtccctattcctgtccatgtgctctccttcagcgctgactcctctgccaaagcaggggtctccaaggatgccatcgtcacaggccctgcccccgggtccttccaccatggccttggccacagtcttctggctggcttgcactccagcccgccccatgcagcgcctctcccacacgctgcggtgcccacccatatcccgcagagtctgccaggtgcttctcagcttcatgggaaagggcctgctgtaccacggaaattgtgaccgcttcagaggcaaggcttgccacttgggtctgggtggaatcagaacgtgcaggtctcccaggatgtacactcactgcgccctttctgctgcttggtgttcttctggaggagcgtgagttctcagcggagcgcttctcggcacttctgatgtgcctcccatggagggagccgggcccttgctgctcaggaggtgcagactgccccgtgctctggcttgcagctctgtcgctagacggttgttagaggggcagctctaggctggggcttgcgctgggccgtggtgggaggcacagtgtttacaggctctggtggcagagcagttggcacacctgtgggtgaatctgcctgatcccctggcatttggtcagagtacctcagagcaccccactgctcaggggctccttctggctgcagtaagctccctggatggtcacagtgccgccccatccccaggctgtgtgctcaaagcggacaaaactcaggccagagccacagctgggagacctgcactgtccctgcgaaatactaagaacacctagggtgtgctcactgtgggggccagtttctcctcggaacatgacaatgaagctcttttagagaaaagacctttgtagattcaacaattatgataggatttttacagacacctattttgggctcagttttcatcattaccattaaatgccattggatagaaggggactgttcttcacacatcatattataggaagacataattccagtgcctttatggtggagcagaattcgacaacacatgtccattctgccctctgaatggatctgagacgaagaccttttaaaagatatgtctgtattgaagagaaagccagttttgagttttctacacttgcacatcattatctgtgccgtcctgactagaatgtgtctgggcccccaaattccatgtccctttatatccatggctcccattttgttttttcccgagttcgtggaggtggactgcatagcccagagcccttcatctctctgagggtcaaggataccagggtcccaagtcacagatagacattccagtttgtattcttaggaatcattcttaggcagtgcggtataatcaggcctctgtgaagtgtctgccgggtagaaataggccttgaagtcctggggctctccaggcagtggggttatgtgtcgactgaagggtgatgtgcagaagatcttggagagtggatcagagagactaggacagttactgcagagctcctaagtcaccactcaaccagtggctgtttcacaaggatttgagggcacttgcctgtcttgtgaggtctgtgccacaaggtgagtctgaactgactgctccagctaagtgatcaggcacgttgagagtatatggtgtcctcagcacatacacctgtgggaaaacggaccgctcttggctcctgactcccagggtacagcgcccagtaactcatccttcattcagaggtttgctggccttcccggtttcccaaggagcaagacctctgtctgccctttggcccggcctctgctctgactcctttttttacataagaaccaatctgtgtttcacattgggctaagtggattccttatccctttgttatatatattttttgcaacttggatttccagtttgtttacagagtagtcttaggtagtagcaaaagagccaaagaagagatttgtattgctgagctcaaagccaagcagaggccggcagtggaggctgagcagggactctccaggcttctctgcccataaacacccgggtcccaggccctccttcctttccctttggtgctccctcctccccatgtaccattgcgcgtgcagctggagcagaataccctcatttttaggaatctagtgatgcctcttgcctcagggaaacgtttctttgatggggagtttgagatttcttttccttgtttatgctttatttgtggtaatgaaagagcgaatgactgaacagccatggcaaggcagacctacaggcgaggccgcagcagagggtggggcagagcagcctcggggtctgggggctgcaggggtttccctggcgcagcgaaagtctctgagcacttaccgggcgtgaccgtttcttaggtgtgagaggggctgtggcttttgtgcagcgactatgttggtgttaggggtggtgtggagattgttaatcttgtataaagcaattcaataaattgtttcaaggtttccaaaaca

SEQ ID NO: 263 - DNA, 2307 bp, Human
cgcgactagggtgcagcgccaggtccggtgttggggtgtccgagttgccgccggagaggagtggcctcgcccgcttgagttttgattcatcatggataatctgtcatcagaagaaattcaacagagagctcaccagattactgatgagtctctggaaagtacgaggagaatcctgggtttagccattgagtctcaggatgcaggaatcaagaccatcactatgctggatgaacaaaaggaacaactaaaccgcatagaagaaggcttggaccaaataaataaggacatgagagagacagagaagactttaacagaactcaacaaatgctgtggcctttgtgtctgcccatgtaatagaacaaagaactttgagtctggcaaggcttataagacaacatggggagatggtggagaaaactcaccttgcaatgtagtatctaaacagccaggcccggtgacaaatggtcagcttcagcaaccaacaacgggagcagccagtggtggatacattaaacgcataactaatgatgccagagaagatgaaatggaagagaacctgactcaagtgggcagtatcctgggaaatctaaaagacatggccctgaacataggcaatgagattgatgctcaaaatccacaaataaaacgaatcacagacaaggctgacaccaacagagatcgtattgatattgccaatgccagagcaaagaaactcattgacagctaaagctactgctgttcttctttatcatttattcacttccgtagctcctccttgaaagttattaccttttcagagtttaagttttcggttccacgctcttctaattgggagataatatggaagaagggccagagcagttacagccctccttcttttttgttttctgttgagggccgactgctgctctgccttccttctagtattttctttctcaattcatacgcttagattggttttcatatgtcatgtttagtgttttcatcctcctcatatacttcagcaggttcttttgctttcaagatttggaagcattgccaaagacagccatgaagaaggaagctgtagaggtgttttttgttgttgtttatttttgcttttgtggttgagggaaggacaagagataagaggttgttacctcagtaaaaaccttcaggccacaaagcaaaaagttgcatagccacaacgaagatctagttggatatagtttttgatttaagttgcagttatagccaatttaggctaatgcttggttttggagcttttatacacaacgtttttgttaggcatcacagttttgcaacctctgctccaaagagaaaaatagaatgagttttctttcttttttttttttttggagtcagagtctcgctctcttgtccaggctggagtgcaatagcgcgatctgggctcactgcaacctccgcctccctggttcaagcaattctcctgccttgcctcctgagtagctgggattacaggcgtgtgtcaccacgctcggctaatttttgtatttttagtagagacagggtttcaccatgtcaagctggtcttggactcctgacgtcgtgatccacccgccttggcctcccaaagtactgggattacaggcgtgagccactgtgcctggctgagttttcttaaagtgagcttaatttctgaactcttagtgattcatatatgtacataaatctgtgatcccatttcttattgcaccattcaggaacactttatataaatgagtggctttttatttcatattattagtagtatcatggttccattacaggcctattaacatcatacattgtcattagtctttgaagaaaaaatatgtaaatatatatgtgtaacatgagaatttctctctaaagcagggcttaaaattttttggaaaagtttgacaaagcataccacatgaattcagatttacctcaatgctaagaattatgtttagttaggaaaaaggaaagtcattttgacctcaggtagaaaaatagattgctttgagttttatgtagctttagactttaaaaagttagaatttattctgtaactaaaaattatttgaaaaaattatgcctctggtttaattattggtgattacacactctttctcttacccttgtgtattgaactatgtccataatcaagttgatgtggatcctgaaaagtgttatgaacatctgattggtatttgtcacatttattttaaaattagcatctgaacacttcaaagctgtcagtgtgtattggtttcaccaataaccactgcttgatccttacaattaaattttttaactaac

SEQ ID NO: 264 - protein, 211 aa, Human
MDNLSSEEIQQRAHQITDESLESTRRILGLAIESQDAGIKTITMLDEQKEQLNRIEEGLDQINKDMRETEKTLTELNKCCGLCVCPCNRTKNFESGKAYKTTWGDGGENSPCNVVSKQPGPVTNGQLQQPTTGAASGGYIKRITNDAREDEMEENLTQVGSILGNLKDMALNIGNEIDAQNPQIKRITDKADTNRDRIDIANARAKKLIDS

SEQ ID NO: 265 - DNA, 2684 bp, Human
cccgagaggagtcggtggcagcggcggcggcgggaccggcagcagcagcagcagcagcagcagcaaccactagcctcctgccccgcggcgctgccgcacgagccccacgagccgctcaccccgccgttctcagcgctgcccgaccccgctggcgcgccctcccgccgccagtcccggcagcgccctcagttgtcctccgactcgccctcggccttccgcgccagccgcagccacagccgcaacgccacccgcagccacagccacagccacagccccaggcatagccttcggcacagccccggctccggctcctgcggcagctcctctgggcaccgtccctgcgccgacatcctggaggttgggatgctcttgtccaaaatcaactcgcttgcccacctgcgcgccgcgccctgcaacgacctgcacgccaccaagctggcgcccggcaaggagaaggagcccctggagtcgcagtaccaggtgggcccgctactgggcagcggcggcttcggctcggtctactcaggcatccgcgtctccgacaacttgccggtggccatcaaacacgtggagaaggaccggatttccgactggggagagctgcctaatggcactcgagtgcccatggaagtggtcctgctgaagaaggtgagctcgggtttctccggcgtcattaggctcctggactggttcgagaggcccgacagtttcgtcctgatcctggagaggcccgagccggtgcaagatctcttcgacttcatcacggaaaggggagccctgcaagaggagctggcccgcagcttcttctggcaggtgctggaggccgtgcggcactgccacaactgcggggtgctccaccgcgacatcaaggacgaaaacatccttatcgacctcaatcgcggcgagctcaagctcatcgacttcgggtcgggggcgctgctcaaggacaccgtctacacggacttcgatgggacccgagtgtatagccctccagagtggatccgctaccatcgctaccatggcaggtcggcggcagtctggtccctggggatcctgctgtatgatatggtgtgtggagatattcctttcgagcatgacgaagagatcatcaggggccaggttttcttcaggcagagggtctcttcagaatgtcagcatctcattagatggtgcttggccctgagaccatcagataggccaaccttcgaagaaatccagaaccatccatggatgcaagatgttctcctgccccaggaaactgctgagatccacctccacagcctgtcgccggggcccagcaaatagcagcctttctggcaggtcctcccctctcttgtcagatgcccgagggaggggaagcttctgtctccagcttcccgagtaccagtgacacgtctcgccaagcaggacagtgcttgatacaggaacaacatttacaactcattccagatcccaggcccctggaggctgcctcccaacagtggggaagagtgactctccaggggtcctaggcctcaactcctcccatagatactctcttcttctcataggtgtccagcattgctggactctgaaatatcccgggggtggggggtgggggtgggtcagaaccctgccatggaactgttttcttcatcatgagttctgctgaatgccgcgatgggtcaggtaggggggaaacaggttgggatgggataggactagcaccattttaagtccctgtcacctcttccgactctttctgagtgccttctgtggggactccggctgtgctgggagaaatacttgaacttgcctcttttacctgctgcttctccaaaaatctgcctgggttttgttccctatttttctctcctgtcctccctcaccccctccttcatatgaaaggtgccatggaagaggctacagggccaaacgctgagccacctgcccttttttctgcctcctttagtaaaactccgagtgaactggtcttcctttttggtttttacttaactgtttcaaagccaagacctcacacacacaaaaaatgcacaaacaatgcaatcaacagaaaagctgtaaatgtgtgtacagttggcatggtagtatacaaaaagattgtagtggatctaatttttaagaaattttgcctttaagttattttacctgtttttgtttcttgttttgaaagatgcgcattctaacctggaggtcaatgttatgtatttatttatttatttatttggttcccttcctattccaagcttccatagctgctgccctagttttctttcctcctttcctcctctgacttggggaccttttgggggagggctgcgacgcttgctctgtttgtggggtgacgggactcaggcgggacagtgctgcagctccctggcttctgtggggcccctcacctacttacccaggtgggtcccggctctgtgggtgatggggaggggcattgctgactgtgtatataggataattatgaaaagcagttctggatggtgtgccttccagatcctctctggggctgtgttttgagcagcaggtagcctgctggttttatctgagtgaaatactgtacaggggaataaaagagatcttatttttttttttatacttggcgttttttgaataaaaaccttttgtcttaaaaaaaaaaaaaaaaaaaaaaaaaaaaaaaaaaaaaaaaaaaa

SEQ ID NO: 266 - protein, 313 aa, Human
MLLSKINSLAHLRAAPCNDLHATKLAPGKEKEPLESQYQVGPLLGSGGFGSVYSGIRVSDNLPVAIKHVEKDRISDWGELPNGTRVPMEVVLLKKVSSGFSGVIRLLDWFERPDSFVLILERPEPVQDLFDFITERGALQEELARSFFWQVLEAVRHCHNCGVLHRDIKDENILIDLNRGELKLIDFGSGALLKDTVYTDFDGTRVYSPPEWIRYHRYHGRSAAVWSLGILLYDMVCGDIPFEHDEEIIRGQVFFRQRVSSECQHLIRWCLALRPSDRPTFEEIQNHPWMQDVLLPQETAEIHLHSLSPGPSK

SEQ ID NO: 267 - DNA, 4104 bp, Human
gtgagagagtgagcgagacagaaagagagagaagtgcaccagcgagccggggcaggaagaggaggtttcgccaccggagcggcccggcgacgcgctgacagcttcccctgcccttcccgtcggtcgggccgccagccgccgcagccctcggcctgcacgcagccaccggccccgctcccggagcccagcgccgccgaggccgcagccgcccggccagtaaggcggcgccgccgcccggccaccgcgcgccctgcgcttccctccgcccgcgctgcggccatggcgcggcgctgactggcctggcccggccccgccgcgctcccgctcgccccgacccgcactcgggcccgcccgggctccggcctgccgccgcctcttccttctccagccggcaggcccgcgccgcttaggagggagagcccacccgcgccaggaggccgaacgcggactcgccacccggcttcagaatggcagaagatgatccatatttgggaaggcctgaacaaatgtttcatttggatccttctttgactcatacaatatttaatccagaagtatttcaaccacagatggcactgccaacagcagatggcccataccttcaaatattagagcaacctaaacagagaggatttcgtttccgttatgtatgtgaaggcccatcccatggtggactacctggtgcctctagtgaaaagaacaagaagtcttaccctcaggtcaaaatctgcaactatgtgggaccagcaaaggttattgttcagttggtcacaaatggaaaaaatatccacctgcatgcccacagcctggtgggaaaacactgtgaggatgggatctgcactgtaactgctggacccaaggacatggtggtcggcttcgcaaacctgggtatacttcatgtgacaaagaaaaaagtatttgaaacactggaagcacgaatgacagaggcgtgtataaggggctataatcctggactcttggtgcaccctgaccttgcctatttgcaagcagaaggtggaggggaccggcagctgggagatcgggaaaaagagctaatccgccaagcagctctgcagcagaccaaggagatggacctcagcgtggtgcggctcatgtttacagcttttcttccggatagcactggcagcttcacaaggcgcctggaacccgtggtatcagacgccatctatgacagtaaagcccccaatgcatccaacttgaaaattgtaagaatggacaggacagctggatgtgtgactggaggggaggaaatttatcttctttgtgacaaagttcagaaagatgacatccagattcgattttatgaagaggaagaaaatggtggagtctgggaaggatttggagatttttcccccacagatgttcatagacaatttgccattgtcttcaaaactccaaagtataaagatattaatattacaaaaccagcctctgtgtttgtccagcttcggaggaaatctgacttggaaactagtgaaccaaaacctttcctctactatcctgaaatcaaagataaagaagaagtgcagaggaaacgtcagaagctcatgcccaatttttcggatagtttcggcggtggtagtggtgccggagctggaggcggaggcatgtttggtagtggcggtggaggagggggcactggaagtacaggtccagggtatagcttcccacactatggatttcctacttatggtgggattactttccatcctggaactactaaatctaatgctgggatgaagcatggaaccatggacactgaatctaaaaaggaccctgaaggttgtgacaaaagtgatgacaaaaacactgtaaacctctttgggaaagttattgaaaccacagagcaagatcaggagcccagcgaggccaccgttgggaatggtgaggtcactctaacgtatgcaacaggaacaaaagaagagagtgctggagttcaggataacctctttctagagaaggctatgcagcttgcaaagaggcatgccaatgcccttttcgactacgcggtgacaggagacgtgaagatgctgctggccgtccagcgccatctcactgctgtgcaggatgagaatggggacagtgtcttacacttagcaatcatccaccttcattctcaacttgtgagggatctactagaagtcacatctggtttgatttctgatgacattatcaacatgagaaatgatctgtaccagacgcccttgcacttggcagtgatcactaagcaggaagatgtggtggaggatttgctgagggctggggccgacctgagccttctggaccgcttgggtaactctgttttgcacctagctgccaaagaaggacatgataaagttctcagtatcttactcaagcacaaaaaggcagcactacttcttgaccaccccaacggggacggtctgaatgccattcatctagccatgatgagcaatagcctgccatgtttgctgctgctggtggccgctggggctgacgtcaatgctcaggagcagaagtccgggcgcacagcactgcacctggctgtggagcacgacaacatctcattggcaggctgcctgctcctggagggtgatgcccatgtggacagtactacctacgatggaaccacacccctgcatatagcagctgggagagggtccaccaggctggcagctcttctcaaagcagcaggagcagatcccctggtggagaactttgagcctctctatgacctggatgactcttgggaaaatgcaggagaggatgaaggagttgtgcctggaaccacgcctctagatatggccaccagctggcaggtatttgacatattaaatgggaaaccatatgagccagagtttacatctgatgatttactagcacaaggagacatgaaacagctggctgaagatgtgaagctgcagctgtataagttactagaaattcctgatccagacaaaaactgggctactctggcgcagaaattaggtctggggatacttaataatgccttccggctgagtcctgctccttccaaaacacttatggacaactatgaggtctctgggggtacagtcagagagctggtggaggccctgagacaaatgggctacaccgaagcaattgaagtgatccaggcagcctccagcccagtgaagaccacctctcaggcccactcgctgcctctctcgcctgcctccacaaggcagcaaatagacgagctccgagacagtgacagtgtctgcgacagcggcgtggagacatccttccgcaaactcagctttaccgagtctctgaccagtggtgcctcactgctaactctcaacaaaatgccccatgattatgggcaggaaggacctctagaaggcaaaatttagcctgctgacaatttcccacaccgtgtaaaccaaagccctaaaattccactgcgttgtccacaagacagaagctgaagtgcatccaaaggtgctcagagagccggcccgcctgaatcattctcgatttaactcgagaccttttcaacttggcttcctttcttggttcataaatgaattttagtttggttcacttacagatagtatctagcaatcacaacactggctgagcggatgcatctggggatgaggttgcttactaagctttgccagctgctgctggatcacagctgctttctgttgtcattgctgttgtccctctgctacgttcctattgtcattaaaggtatcacggtcgccacctggcattccttctgaccacagcatcattttgcattcaaattaagggttaagaaaagagatattttaaaatgagagtcacttgatgtgccattttaaaaaaaaaggcatattgctttttctaatgtggttatttctctgatttgcaaaaaaaaaaaaaaaaaaaaaatacttgtcaatatttaaacatggttacaatcattgctgaaaatggtattttcccccttttctgcattttgctattgtaaatatgttttttagatcaaatactttaaaggaaaaaatgttggatttataaatgctattttttattttacttttataataaaaggaaaagcaaattgatgacctcaaaaaaaaaaaaaaaaaa

SEQ ID NO: 268 - DNA, 6796 bp, Human
ggccaaaggtcaagatacttctctgggaaatgttgctgctgatgctgctttacaaagtcatacaatgagtgtttggtttaagaaagattttcatacttaaaagattttcatcttggaaatacatcaagtgaaaattaaattcttttgggaaacattttccttctgatatattatacttgtaatgggcgacatggcaaacaactcagttgcttacagtggtgtgaaaaactctttgaaggaagctaatcatgatggagactttggaattacgctcgcagagctgcgggctctcatggagctcaggtccacagatgcattacgaaaaatacaggaaagctatggagatgtctatggaatttgcaccaaattgaaaacatctcccaatgaaggtttaagtggaaaccctgcagatttagaaagaagagaagcagtgtttggaaagaattttatacctcctaaaaagccaaaaacctttcttcaattagtatgggaagcattacaagatgtcactttaattatattagaaattgcagccatagtatcattgggcctttctttttatcagcctccagaaggggataatgcactttgtggagaagtttctgttggggaggaagaaggtgaaggtgaaactggttggattgaaggagctgcaatcctcttgtctgtagtgtgtgtggtgttagtaacagctttcaatgactggagtaaggaaaaacagtttagaggtttgcagagccgaattgaacaagaacagaagttcactgtcatcaggggtggtcaggtcattcagatacctgtagctgacattactgttggagatattgctcaagtgaaatatggtgatcttcttccagctgacggcatacttattcaaggcaacgatcttaaaattgatgaaagctcattgactggtgaatcagatcatgttaaaaagtctttagataaggatcccttacttctatcaggtactcatgtaatggaaggctctggaagaatggtagttacagctgtaggtgtaaattctcaaactggaattatctttaccttacttggagctggaggtgaagaggaagagaagaaagatgagaagaaaaaggaaaagaaaaataagaaacaagatggagctattgagaatcgcaacaaagcaaaagcccaggatggtgcagccatggaaatgcagccattgaagagtgaagaaggtggagatggtgatgaaaaagataaaaagaaagcaaatttgccaaaaaaggaaaaatctgttttacaagggaaacttacaaaactggctgttcagattggcaaagcaggtctgttgatgtctgccatcacagttatcattctagtattatattttgtcattgacaccttctgggttcagaaaagaccatggcttgctgagtgcacaccaatttatatacaatactttgtgaagttcttcattattggagttacagttttagtggtcgcagtgccagaaggtcttccacttgcagtcacgatctcactggcttattcagtcaaaaaaatgatgaaagataataacttagtaaggcatctggatgcttgtgaaaccatgggaaatgctacagctatttgttcagataaaacaggaactttgacaatgaacagaatgacagtcgttcaagcttacataaatgaaaaacattataaaaaggttcctgaaccagaagctattccaccaaatattttgtcctatcttgtaacaggaatttctgtgaattgtgcttatacatcaaaaatattgccaccagagaaagagggtggattacctcgtcacgttggtaataaaactgaatgtgccttgttgggacttcttttggatttaaaacgggattatcaggatgttagaaatgaaataccagaagaagcactgtacaaagtctacaccttcaattctgttaggaagtccatgagtactgtcctgaaaaattcagatggaagttatcgaatattcagcaagggtgcatctgagataattctgaaaaagtgtttcaaaatcttgagtgctaatggtgaggcaaaagtattcagaccaagggaccgtgatgatattgtaaaaactgtgattgaaccgatggcatcagaaggcttgagaaccatatgtcttgcattcagagattttccagcaggagaaccagaaccagagtgggataatgaaaatgatattgtcaccggccttacatgcattgctgttgtggggattgaagatcctgtgagacctgaggtgccagatgcaattaaaaagtgtcagagggctggaattactgtgcggatggtcactggtgataatattaatactgctcgggccattgctaccaaatgtggtattttacatcctggggaagattttctgtgcctagaaggtaaagattttaacagaagaatacgaaatgaaaaaggagagattgagcaagagaggatagacaagatttggccaaaacttcgagtacttgcaagatcatctcctactgataagcatacactggttaaaggtataattgacagcactgtctcagaccaacgccaggttgtagctgtaactggtgatggtacaaatgatggcccagcactaaagaaagcagatgttggatttgcaatgggtattgctggaactgatgtagctaaagaagcatccgatattattctcacagatgacaactttacaagcattgttaaagcagttatgtggggacgaaatgtctatgacagcatctcaaaattccttcagttccaacttactgttaatgtagtagcagtgattgttgcttttacgggcgcctgcattactcaagactcaccgcttaaggctgtgcagatgctgtgggtaaacctcataatggatacactcgcttccctggctctggcaacggaaccacccactgagtctctcttgcttcggaaaccttatggtagaaataagcctctcatctcacgtacaatgatgaagaatattttgggtcatgcattctatcaacttgtagtagtctttacactcttatttgctggagaaaagttttttgacattgatagtggaagaaatgctcctttgcatgctcctccttcagaacattatactattgtttttaatacctttgtgctgatgcaacttttcaacgaaataaatgcccggaaaattcatggtgaaagaaatgtattcgaaggaatctttaacaatgccatcttctgcacaattgttttaggcacttttgtggtacagataataattgtgcagtttggtggaaaacctttcagttgttcagaactttcaatagaacagtggctatggtcaatattcctaggaatgggaacattactctggggccagcttatttcaacaattccaactagccgtttaaaattcctcaaagaagctggtcatggaacacaaaaggaagaaatacctgaggaggaattagcagaggatgttgaagagattgatcacgctgaaagggagttgcggcgtggccaaatcttgtggtttagaggtctgaacagaatccaaacacagattcgagtggtgaatgcatttcgtagttctttatatgaagggttagaaaaaccggaatcaagaagttcgattcacaactttatgacacatcctgagtttaggatagaagattcagagcctcatatcccccttattgatgacactgatgccgaagatgatgctcctacaaaacgtaactccagtcctccaccctctcccaacaaaaataacaatgctgttgacagtggaattcaccttacaatagaaatgaacaagtctgctacctcttcatccccaggaagcccactacatagtttggaaacatcactctgattgtaagctgaatgttaacacactagctgcattgtaaagaaacaaattgaaactgggtcttttcacatattgtgatggacaagctagtattcttgtctttggacttcaacagaagacacacttgtacgaatgtagatttatttttttaaaaaaaaaaaagcaaagctttctgccagactgagggtgctttttggggggtgggagaaatgaactgacagataaacagtaactcagcgtaagtgacctgtggatcatcagtagtacccaagcatggtcctgaacagtgtattagcagagctttagtttatctcagtcctggatgggagagagagggaggagtaaaactgggcaagacaaagagccctggatcgttgaattgatagtttaatttctgctgttggctgttaataatttggattatttatgtttataaatgatacagatctgtttacaaggtttgtagatactttttttgttcctgttcatagatgggaagcttccttataactgatgcagagaaaaattagtccttcaaatactgctgtattttcaggaaaaaaaaaaaaaggggtgtttctattgaaactgtactaaatttttgcctacaatttaccttgttaaatattgtagataaattgctaatactaatagccaaatagataacactaatgctttgtttaaaaaaacgaaaaaaacaaaacaaaacaaaaaaacatgagcagtggtgttctaatgaagttatgacatctgtcctaattagtttcttaaatacatttactacttaatggttttgaagcaactgtttaatttttaaaatttttgaaaacttgctaataaccttttgttcagaatttagtagattgtttaatgcaggacatcaactacataatgaaagatgcttgaaatgcttttgttatttcaggcaaatcaaattaaatcagactatcaaactacaagagaaccttagtcttttttgtttttgtctaaacatgttagtttagtgatgtcttggtgaactgtgagtgaactgtattgatttttctaatctttagagaccttcacacagcatgagggctgttggcattttgaaaaaggttaataagtagaagcatacatgttttccttttgtttttgaaacttgtttgtaaacataaataaatatgcccttttattaaataaattcatggcaatgtttttttaaaagacatttcagcttctttactcagttctgcatatacagtgcatcagtctgttctctttgaccacaattggaatacatttcaagatggtaacagccccatgaagtaccgctttaattccttgctggtaatctaatagaatcagattaagaaaattaacacaattttaccatttgacatactcttcattgaatttagtttgtctaaaatagtctcacaggtaaaaaacataacaacaatgaccaccattgtctttgatacatttattttaattcttaagtggccaaataacagattaggtaaaatgagattacatgaaaaggttctaaaatgatatatttagatgcaataattaaccatatgctagaatgcccacctctaagccaattggattctttagctctctttttctttccttcatctaccttcttctcttttttgcctctgtctttaccctttagaaactggcatgtgttagggcccagatttcaccagatacacaatcctcaggctgacataaagtttacgaggactgctactataactgagagtgctgaccaagcaaagaaacatttagttgatggtgcttgatatttttggtgggtgggggaaatctttttctcaccatcaaatctttgcagtaatcctctgcaggtcttagaaacacattggctctgtcagcatttgtaattgtacatttattcatcaggtatttatagtgaatcatactgtaaaaaagaggtagcatgatatgctggaaagcatattagactaggagtcaagacctggtttctagtcttggttttgccattaatgtgctgcatgatcttgggaaaatcatttaccctaaataagggtggtggactatcttgaagaaccctttcaactctaaaaattgaccctatcaactggagagcccacaaggcatagggaatagagaaaagggaaatgttttcagttttcttttttattttggttatgcttaaatatgaatgtaattaccaaaagatttagaagtgcatgtgctttggaggatttgtattgagcttttacagtattcatttttcaactcaaggcaatggctttctacaccaactctaatccataaacgggtcttatgacatctatgaagtagtagcaagacatgcttagtgtgtatttctctctttgagacactgtaatttctaccagaaatttccagagcattatgtaggtagaaaaaaatgcaagcaagctgttaaagatcttggatcccattatatagtatgtatagctgaaatctgtaattcaatcactttttctcttttatcctctaaccaaaaaattgtttaattttgcatcccaaatgtttttaatctttgtatattttttaaaaatccttttctcctcatcattgccttttttgtggttgtaaatagacttacttgcactttgaagatgagttactccttgtcatcttacaaatatgtgatatggtaattttcataacagatgtcagttttgaaccaagaattggtgatttgtttataagaaaaaaactggcttcatttctgtgaaattgctctttgaaaatttctttttacacgtgtaagccaactgagataccgtgatggtgttgatttctttcaatgatgcttaccatctattttagccactgagccttttattatttgtctatttgtaaagtttatttgtcttaactcatttaataaatatactgtttatctgtttctgaaaaaaaaaaaaaaaaaaa

SEQ ID NO: 269 - DNA, 4824 bp, Human
ggcgcggaggggctggctgggcaggaggggttggcggggcagcagggccgcggccatggggagcttgaaggaggagctgctcaaagccatctggcacgccttcaccgcactcgaccaggaccacagcggcaaggtctccaagtcccagctcaaggtcctttcccataacctgtgcacggtgctgaaggttcctcatgacccagttgcccttgaagagcacttcagggatgatgatgagggtccagtgtccaaccagggctacatgccttatttaaacaggttcattttggaaaaggtccaagacaactttgacaagattgaattcaataggatgtgttggaccctctgtgtcaaaaaaaacctcacaaagaatcccctgctcattacagaagaagatgcatttaaaatatgggttattttcaactttttatctgaggacaagtatccattaattattgtgtcagaagagattgaatacctgcttaagaagcttacagaagctatgggaggaggttggcagcaagaacaatttgaacattataaaatcaactttgatgacagtaaaaatggcctttctgcatgggaacttattgagcttattggaaatggacagtttagcaaaggcatggaccggcagactgtgtctatggcaattaatgaagtctttaatgaacttatattagatgtgttaaagcagggttacatgatgaaaaagggccacagacggaaaaactggactgaacgatggtttgtactaaaacccaacataatttcttactatgtgagtgaggatctgaaggataagaaaggagacattctcttggatgaaaattgctgtgtagagtccttgcctgacaaagatggaaagaaatgcctttttctcgtaaaatgttttgataagacttttgaaatcagtgcttcagataagaagaagaaacaggagtggattcaagccattcattctactattcatctgttgaagctgggcagccctccaccacacaaagaagcccgccagcgtcggaaagaactccggaagaagcagctggctgaacaagaggaactggagcgacaaatgaaggaactccaggccgccaatgaaagcaagcagcaggagctggaggccgtgcggaagaaactggaggaagcagcatctcgtgcagcagaagaggaaaagaaacgccttcagactcaagtggaacttcaggccaggttcagcacagagctggaaagagagaagcttatcagacagcagatggaagaacaggttgctcaaaagtcctctgaactggaacagtatttacagcgagtacgggagctggaagacatgtacctaaagctgcaggaggctcttgaagatgagagacaggcccggcaagatgaagagacagtgcggaagcttcaggccaggttgttggaggaagagtcttccaagagggctgaactagaaaagtggcacttggagcagcagcaggccattcagacaaccgaggcggagaagcaggagttggagaatcagcgtgtcctgaaggaacaggccctgcaggaggccatggagcagctggaggagcttgagttagaacggaagcaagcacttgagcagtacgaggaagttaaaaagaagctggagatggcaactaataagaccaagagctggaaggacaaagtggcccatcatgaaggattaattcgactgatagaaccaggttcaaagaaccctcacctgatcactaactggggacctgcagctttcactgaggcagaacttgaagagagagagaagaactggaaagagaaaaagaccacggagtgactgagcttgctggcagtcacgtcagttatgtagatactgcatggcaggagagctttacgctaaagacaaaagaaacagctttgggggccgggcgtggtggctcacgcctgtaatcccagcactttgggaggccgaggcgggtggatcacctgaggtcaggagttcaagaccagcctggccaacctggtgaaaccctgtctctactaaaaatacaaaaaaaattagctgagcgtggtggcgggcgcctgtaatcccagctacttgggaggctgaggcaggagaatcacttgaacgtgggaggcggaggttgcagcgagctgagatcatgccgttgtactccagcttgggcaacagagtgagactccatctcaaaacaaaacaaaacaaaacaaaacaaaaaaacccggctttgctgcttttaactcttcttccttctgtgcctctctaagtgggtcagtatcctaaggaagccttcttatttatcttcctgcaaacaagggttacctgaaaagaaaaaaaaagtcaacattgtcaagctgtttgtttactctttctttgaaaacatcaccttctgaaatttgtcttttagctctctcagattcttccccaaatgaggcagggtgcagacagcacagtcagctctgcagagtttggaggggctcactgccactgggtactcagaacctctgtggactggatgtcagctctttcctttggcagcgtgtttccttttccgagtatgtgctgttaaactagattggccggttcgctttccatttcctgacacttgacatggaatgcctttgaccattggtgctctgacagagaagtcatggagtcattgccatttcctggttgcccttttggaatgtgatcctgttagtagaggttttctagcttctactaagatatttctttccctaaccatcatacacttggcatgtttcattcccatctcctttcccctcaccttaaaggagactacccctttgccccatattgtcaacctaattttctctcgtactctctctagtgaatgatgtgctaccaagtatatgccaggctgtgagaggattatactgagtagtagaaagaagctaatttgaaataaaaattatttgtataattaagaaagcagattagatgcacatggtcaacaggaagttgactgtatgtctgctagttagattcaaaacatcataaagatgatagcatgtcaatatattagcctagccattatgttagcctttgttaggtgggcagcttttctgctttttcccttcctctgtggtgacaacggaggaaatatccaacagaaatacgtctaacagggaaattgggatcatagtttatatgcatctgatttgaaaggagtattgaggaaggttttcatatatgatctatctttggattaaaaagaacatttatgaaatcaagccttctaacactagttataattgagaagcaacagtaactccgtggacagcaatcaagcttaaaattgtaaataaatatggggataattcagttgttgcaaaaaaagggcagaattcagtagaataaagtccttttctcttacaggtattaaatgaggacagagaacctcaggtgttcttatgctagtgcttgctgagtgcatactaagaaagcaattccaaatagatgtatacatctagagagagtggtattagagattcagtgtatgtatttatttacatgagaggaaactggaatataatcccataaattattggaatataatcccataaattatcaccttttatgactggaaaatatttgccaatgaagaaatggtctgtaggtatttgtcttaagatttttggctgtttaataaaaatgtaactttaacggtttcttatagttgcctttataaagtgtattgtctaaaatatttttgtatcatgtgcctttgaaatttgacagctgatttgggtgttggatttctgcccagccatttatcagtattatcattttattcagtagctggcaggtgtattagacaaacgagacttaggtaaggaatggaacctttcctgtggtttgactgcacatcacaccagaagactccagtatccctcattccagaatgaggaaaaagtattctacaaagaacctaatcacctctgtgaaatctatgggatggaaacagtgtggccttaggagtcaaatagtctctgcatggtggggaggatcatgatggaatatgtgaatttctacttctagaagttgtgaaataggtcctgcacttttgcagaatgtccttctttaaacctggcttattccacagctgtagctgataacatgacctggggcttagctgctctagccctgggttcttggagacctcacactgcctggcccctggccatccacctaaggactgcctgctttctggtcacatgtggaccttgatacgactaagcggttacatatgtggttgtgcaaaagctttctgtttaatgcatagtgttaccgatttacatcttggttttcagtggcactatgtctaggaggcaatatccttttaaacagtgctttggctaagatagatacttgtgaatcaaagatagcacagaaatgaactaagtatatcccatttggaattatattttgatactatttaaaatggtttcacctgttaaagggccaacagaactcttggttttacttttgtaattactgtacagaaaatttcaagagtgtttgagtgcttgtcatcaggtgttttccttaataagtagggatatgatcatttacaggaattatatatgaaaaaagtttttgaaatgtatttttgtgatgtgctatgttgaggggaaaccaaatatttatgattttaaaacattcgtatgaaaacattgtacaatgtaatatgctcaactttctcaattttttgctaatttttctaagatacattaaaaatgttttatatttttttttaagtaaaatggacccagtaagaaaattaaaaataccagaacatacacttt

SEQ ID NO: 270 - DNA, 1925 bp, Human
agtggagtgggacaggtatataaaggaagtacagggcctggggaagaggccctgtctaggtagctggcaccaggagccgtgggcaagggaagaggccacaccctgccctgctctgctgcagccagaatgggtgtgaaggcgtctcaaacaggctttgtggtcctggtgctgctccagtgctgctctgcatacaaactggtctgctactacaccagctggtcccagtaccgggaaggcgatgggagctgcttcccagatgcccttgaccgcttcctctgtacccacatcatctacagctttgccaatataagcaacgatcacatcgacacctgggagtggaatgatgtgacgctctacggcatgctcaacacactcaagaacaggaaccccaacctgaagactctcttgtctgtcggaggatggaactttgggtctcaaagattttccaagatagcctccaacacccagagtcgccggactttcatcaagtcagtaccgccattcctgcgcacccatggctttgatgggctggaccttgcctggctctaccctggacggagagacaaacagcattttaccaccctaatcaaggaaatgaaggccgaatttataaaggaagcccagccagggaaaaagcagctcctgctcagcgcagcactgtctgcggggaaggtcaccattgacagcagctatgacattgccaagatatcccaacacctggatttcattagcatcatgacctacgattttcatggagcctggcgtgggaccacaggccatcacagtcccctgttccgaggtcaggaggatgcaagtcctgacagattcagcaacactgactatgctgtggggtacatgttgaggctgggggctcctgccagtaagctggtgatgggcatccccaccttcgggaggagcttcactctggcttcttctgagactggtgttggagccccaatctcaggaccgggaattccaggccggttcaccaaggaggcagggacccttgcctactatgagatctgtgacttcctccgcggagccacagtccatagaaccctcggccagcaggtcccctatgccaccaagggcaaccagtgggtaggatacgacgaccaggaaagcgtcaaaagcaaggtgcagtacctgaaggataggcagctggcaggcgccatggtatgggccctggacctggatgacttccagggctccttctgcggccaggatctgcgcttccctctcaccaatgccatcaaggatgcactcgctgcaacgtagccctctgttctgcacacagcacgggggccaaggatgccccgtccccctctggctccagctggccgggagcctgatcacctgccctgctgagtcccaggctgagcctcagtctccctcccttggggcctatgcagaggtccacaacacacagatttgagctcagccctggtgggcagagaggtagggatggggctgtggggatagtgaggcatcgcaatgtaagactcgggattagtacacacttgttgatgattaatggaaatgtttacagatccccaagcctggcaagggaatttcttcaactccctgccccctagccctccttatcaaaggacaccattttggcaagctctatcaccaaggagccaaacatcctacaagacacagtgaccatactaattataccccctgcaaagccagcttgaaaccttcacttaggaacgtaatcgtgtcccctatcctacttccccttcctaattccacagctgctcaataaagtacaagagtttaacagtgtgttggcgctttgctttggtctatctttgagcgcccactagacccactggactcacctcccccatctcttctgggttccttcctctgagccttgggacccctgagcttgcagagatgaaggccgccatgtt

SEQ ID NO: 271 - protein, 383 aa, Human
MGVKASQTGFVVLVLLQCCSAYKLVCYYTSWSQYREGDGSCFPDALDRFLCTHIIYSFANISNDHIDTWEWNDVTLYGMLNTLKNRNPNLKTLLSVGGWNFGSQRFSKIASNTQSRRTFIKSVPPFLRTHGFDGLDLAWLYPGRRDKQHFTTLIKEMKAEFIKEAQPGKKQLLLSAALSAGKVTIDSSYDIAKISQHLDFISIMTYDFHGAWRGTTGHHSPLFRGQEDASPDRFSNTDYAVGYMLRLGAPASKLVMGIPTFGRSFTLASSETGVGAPISGPGIPGRFTKEAGTLAYYEICDFLRGATVHRTLGQQVPYATKGNQWVGYDDQESVKSKVQYLKDRQLAGAMVWALDLDDFQGSFCGQDLRFPLTNAIKDALAAT

SEQ ID NO: 272 - DNA, 2473 bp, Human
aatcgcgaaacccggcgagcggcgcgctggctatcgagcgagcggggcggaaccgggagttgcgccgccgctcgggcgccgggctccgtcgcggccgcagccccgcgggtcgccctcccgtgcctcgcccgcggacaccctggccgtggacaccctggccgtgggcacccgcggggcgcggcgcgggcgctgcgcggcggcggcggcggcatgaaggtcacgtcgctcgacgggcgccagctgcgcaagatgctccgcaaggaggcggcggcgcgctgcgtggtgctcgactgccggccctatctggccttcgctgcctcgaacgtgcgcggctcgctcaacgtcaacctcaactcggtggtgctgcggcgggcccggggcggcgcggtgtcggcgcgctacgtgctgcccgacgaggcggcgcgcgcgcggctcctgcaggagggcggcggcggcgtcgcggccgtggtggtgctggaccagggcagccgccactggcagaagctgcgagaggagagcgccgcgcgtgtcgtcctcacctcgctactcgcttgcctacccgccggcccgcgggtctacttcctcaaagggggatatgagactttctactcggaatatcctgagtgttgcgtggatgtaaaacccatttcacaagagaagattgagagtgagagagccctcatcagccagtgtggaaaaccagtggtaaatgtcagctacaggccagcttatgaccagggtggcccagttgaaatccttcccttcctctaccttggaagtgcctaccatgcatccaagtgcgagttcctcgccaacttgcacatcacagccctgctgaatgtctcccgacggacctccgaggcctgcatgacccacctacactacaaatggatccctgtggaagacagccacacggctgacattagctcccactttcaagaagcaatagacttcattgactgtgtcagggaaaagggaggcaaggtcctggtccactgtgaggctgggatctcccgttcacccaccatctgcatggcttaccttatgaagaccaagcagttccgcctgaaggaggccttcgattacatcaagcagaggaggagcatggtctcgcccaactttggcttcatgggccagctcctgcagtacgaatctgagatcctgccctccacgcccaacccccagcctccctcctgccaaggggaggcagcaggctcttcactgataggccatttgcagacactgagccctgacatgcagggtgcctactgcacattccctgcctcggtgctggcaccggtgcctacccactcaacagtctcagagctcagcagaagccctgtggcaacggccacatcctgctaaaactgggatggaggaatcggcccagccccaagagcaactgtgatttttgtttttaagactcatggacatttcatacctgtgcaatactgaagacctcattctgtcatgctgccccagtgagatagtgagtggtcaccaggcttgcaaatgaacttcagacggacctcagggtaggttctcgggactgaaggaaggccaagccattacgggagcacagcatgtgctgactactgtacttccagacccctgccctcttgggactgcccagtccttgcacctcagagttcgccttttcatttcaagcataagccaataaatacctgcagcaacgtgggagaaagaagttgctggaccaggagaaaaggcagttatgaagccaattcattttgaaggaagcacaatttccaccttattttttgaactttggcagtttcaatgtctgtctctgttgcttcggggcataagctgatcaccgtctagttgggaaagtcaccctacagggtttgtagggacatgatcagcatcctgatttgaaccctgaaatgttgtgtagacaccctcttgggtccaatgaggtagttggttgaagtagcaagatgttggcttttctggattttttttgccatgggttcttcactgaccttggactttggcatgattcttagtcatacttgaacttgtctcattccacctcttctcagagcaactcttcctttgggaaaagagttcttcagatcatagaccaaaaaagtcataccttcgaggtggtagcagtagattccaggaggagaagggtacttgctaggtatcctgggtcagtggcggtgcaaactggtttcctcagctgcctgtccttctgtgtgcttatgtctcttgtgacaattgttttcctccctgcccctggaggttgtcttcaactgtggacttctgggatttgcagattttgcaacgtggtactacttttttttctttttgtctgttagttatttctccaggggaaaaggcaataattttctaagacccgtgtgaatgtgaagaaaagcagtatgttactggttgttgttgttgttcttgttttttatatgtaaaataaaaatagtgaaaggag

SEQ ID NO: 273 - protein, 384 aa, Human
MKVTSLDGRQLRKMLRKEAAARCVVLDCRPYLAFAASNVRGSLNVNLNSVVLRRARGGAVSARYVLPDEAARARLLQEGGGGVAAVVVLDQGSRHWQKLREESAARVVLTSLLACLPAGPRVYFLKGGYETFYSEYPECCVDVKPISQEKIESERALISQCGKPVVNVSYRPAYDQGGPVEILPFLYLGSAYHASKCEFLANLHITALLNVSRRTSEACMTHLHYKWIPVEDSHTADISSHFQEAIDFIDCVREKGGKVLVHCEAGISRSPTICMAYLMKTKQFRLKEAFDYIKQRRSMVSPNFGFMGQLLQYESEILPSTPNPQPPSCQGEAAGSSLIGHLQTLSPDMQGAYCTFPASVLAPVPTHSTVSELSRSPVATATSC

SEQ ID NO: 274 - DNA, 1763 bp, Human
gcactggactgagaaccttcaccaaaaaaatgtctgcccagagacagatgaggtccttcagctccagtgctgattggttcttttccaaaggcccatctaatcctaccacgcacggaaatatccacaggtttttattctttctgccagctacatcagatccatcaggtccgagctgagttgactaccactacttttccctttgtctcaattatgtcttggaagaaggctttgcggatccccggaggccttcgggcaccaactgtgaccttgatgctggcgatgctgagcaccccagtggctgagggcagagaccctcccgaggatttcgtgctccagtttaaggccatgtgctacttcaccaatgggacggagcgcgtgcgttatgtgaccagatacatctataaccgagaggaggacgtgcgcttcgacagcgacgtgggggtgtatcgggcggtgacggcgcaggggcggcctgacgccgagtactggaacagccagaaggacatcctggagaggacccgagcggagttggacacggtgtgcagacacaactacgaggtggcgttccgcgggatcttgcagaggagagtggagcccacagtgaccatctccccatccaggacagaggccctcaaccaccacaacctgctggtctgctcggtgacagatttctatccaggccagatcaaagtccggtggtttcggaatgaccaggaggagacagctggcgttgtgtccaccccccttattaggaacggtgactggaccttccagatcctggtgatgctggaaatgactccccagcatggagacgtctacacctgccacgtggagcaccccagcctccagagccccatcaccgtggagtggcgggctcagtctgaatctgcccagaacaagatgctgagtggcattggaggcttcgtgctggggctgatcttcctcgggctgggccttatcatccgtcaaaggagtcagaaaggacctcaagggcctccaccagcagggcttctgcactgactcctgagactattttaactaggattggttatcactcttctgtgatgcctgcttgtgcctgcccagaattcccagctgcctgtgtcagcttgtcccccgagatcaaagtcctacagtggctgtcacgcagccaccaggtcatctcctttcatccccaccccaaggcgctggctgtgactctgcttcctgcactgacccagagcctctgcctgtgcacggccagctgcgtctactcaggtcccaaggggtttctgtttctattctctcctcagactgctcaagagaagcacatgaaaaacattacctgactttagagcttttttacataattaaacatgatcctgagttaaaaaaaaaaaaggaaatcgctgcagaatgaaggaatatcccttgaggtgacccagccaacctgtggccagaaggagggttgtaccttgaaaagaccactgaaagcattttggggtgtcaagtaagggtgggcagaggaggtagaaaatcaattcaattgtcgcatcattcatggttctttaatattgatgctcagtgcattggccttagaatatcccagcctctcttctggtttggtgagtgctgtgtaagtaagcatggtagaattgtttggagacatatatagtgatccttggtcactggtgtttcaaacattctggaaagtcacatcgatcaagaatattttttatttttaagaaagcataaccagcaataaaaatactatttttgagtct

SEQ ID NO: 275 - DNA, 2521 bp, Human
gaagctctttcgcggcgctacggcgttggcaccagtctctagaaaagaagtcagctctggttcggagaagcagcggctggcgtgggccatccggggaatgggcgccctcgtgacctagtgttgcggggcaaaaagggtcttgccggcctcgctcgtgcaggggcgtatctgggcgcctgagcgcggcgtgggagccttgggagccgccgcagcagggggcacacccggaaccggcctgagcgcccgggaccatgaacggggaggccatctgcagcgccctgcccaccattccctaccacaaactcgccgacctgcgctacctgagccgcggcgcctctggcactgtgtcgtccgcccgccacgcagactggcgcgtccaggtggccgtgaagcacctgcacatccacactccgctgctcgacagtgaaagaaaggatgtcttaagagaagctgaaattttacacaaagctagatttagttacattcttccaattttgggaatttgcaatgagcctgaatttttgggaatagttactgaatacatgccaaatggatcattaaatgaactcctacataggaaaactgaatatcctgatgttgcttggccattgagatttcgcatcctgcatgaaattgcccttggtgtaaattacctgcacaatatgactcctcctttacttcatcatgacttgaagactcagaatatcttattggacaatgaatttcatgttaagattgcagattttggtttatcaaagtggcgcatgatgtccctctcacagtcacgaagtagcaaatctgcaccagaaggagggacaattatctatatgccacctgaaaactatgaacctggacaaaaatcaagggccagtatcaagcacgatatatatagctatgcagttatcacatgggaagtgttatccagaaaacagccttttgaagatgtcaccaatcctttgcagataatgtatagtgtgtcacaaggacatcgacctgttattaatgaagaaagtttgccatatgatatacctcaccgagcacgtatgatctctctaatagaaagtggatgggcacaaaatccagatgaaagaccatctttcttaaaatgtttaatagaacttgaaccagttttgagaacatttgaagagataacttttcttgaagctgttattcagctaaagaaaacaaagttacagagtgtttcaagtgccattcacctatgtgacaagaagaaaatggaattatctctgaacatacctgtaaatcatggtccacaagaggaatcatgtggatcctctcagctccatgaaaatagtggttctcctgaaacttcaaggtccctgccagctcctcaagacaatgattttttatctagaaaagctcaagactgttattttatgaagctgcatcactgtcctggaaatcacagttgggatagcaccatttctggatctcaaagggctgcattctgtgatcacaagaccactccatgctcttcagcaataataaatccactctcaactgcaggaaactcagaacgtctgcagcctggtatagcccagcagtggatccagagcaaaagggaagacattgtgaaccaaatgacagaagcctgccttaaccagtcgctagatgcccttctgtccagggacttgatcatgaaagaggactatgaacttgttagtaccaagcctacaaggacctcaaaagtcagacaattactagacactactgacatccaaggagaagaatttgccaaagttatagtacaaaaattgaaagataacaaacaaatgggtcttcagccttacccggaaatacttgtggtttctagatcaccatctttaaatttacttcaaaataaaagcatgtaagtgactgtttttcaagaagaaatgtgtttcataaaaggatatttatatctctgttgctttgactttttttatataaaatccgtgagtattaaagctttattgaaggttctttgggtaaatattagtctccctccatgacactgcagtattttttttaattaatacaagtaaaaagtttgaattttgctacatagttcaatttttatgtctcttttgttaacagaaaccacttttaaaggatagtaattattcttgtttataacagtgccttaaggtatgatgtatttctgatggaagccattttcacattcatgttcttcatggattatttgttacttgtctaagatgcaatttgattttatgaagtatataccctttacccaccagagacagtacagaatccctgccctaaaatcccaggcttaattgccctacaaagggttattaatttaaaactccattattaggattacattttaaagttttatttatgaattccctttaaaaatgatatttcaaaggtaaaacaatacaatataaagaaaaaaataaatatattaataccggcttcctgtccccatttttaacctcagccttccctactgtcaccaacaaccaagctaaataaagtcaacagcctgatgtgt

SEQ ID NO: 276 - protein, 540 aa, Human
MNGEAICSALPTIPYHKLADLRYLSRGASGTVSSARHADWRVQVAVKHLHIHTPLLDSERKDVLREAEILHKARFSYILPILGICNEPEFLGIVTEYMPNGSLNELLHRKTEYPDVAWPLRFRILHEIALGVNYLHNMTPPLLHHDLKTQNILLDNEFHVKIADFGLSKWRMMSLSQSRSSKSAPEGGTIIYMPPENYEPGQKSRASIKHDIYSYAVITWEVLSRKQPFEDVTNPLQIMYSVSQGHRPVINEESLPYDIPHRARMISLIESGWAQNPDERPSFLKCLIELEPVLRTFEEITFLEAVIQLKKTKLQSVSSAIHLCDKKKMELSLNIPVNHGPQEESCGSSQLHENSGSPETSRSLPAPQDNDFLSRKAQDCYFMKLHHCPGNHSWDSTISGSQRAAFCDHKTTPCSSAIINPLSTAGNSERLQPGIAQQWIQSKREDIVNQMTEACLNQSLDALLSRDLIMKEDYELVSTKPTRTSKVRQLLDTTDIQGEEFAKVIVQKLKDNKQMGLQPYPEILVVSRSPSLNLLQNKSM

SEQ ID NO: 277 - DNA, 2470 bp, Human
ggcggctgtagccgagggggcggccggaaagcagcggcggcgtctggggcgctttcgcaacattcagacctcggttgcagcccggtgccgtgagctgaagaggtttcacatcttactccgccccacaccctgggcgttgcggcgctgggctcgttgctgcagccggaccctgctcgatgggcacgactgggctggagagtctgagtctgggggaccgcggagctgcccccaccgtcacctctagtgagcgcctagtcccagacccgccgaatgacctccgcaaagaagatgttgctatggaattggaaagagtgggagaagatgaggaacaaatgatgataaaaagaagcagtgaatgtaatcccttgctacaagaacccatcgcttctgctcagtttggtgctactgcaggaacagaatgccgtaagtctgtcccatgtggatgggaaagagttgtgaagcaaaggttatttgggaagacagcaggaagatttgatgtgtactttatcagcccacaaggactgaagttcagatccaaaagttcacttgctaattatcttcacaaaaatggagagacttctcttaagccagaagattttgattttactgtactttctaaaaggggtatcaagtcaagatataaagactgcagcatggcagccctgacatcccatctacaaaaccaaagtaacaattcaaactggaacctcaggacccgaagcaagtgcaaaaaggatgtgtttatgccgccaagtagtagttcagagttgcaggagagcagaggactctctaactttacttccactcatttgcttttgaaagaagatgagggtgttgatgatgttaacttcagaaaggttagaaagcccaaaggaaaggtgactattttgaaaggaatcccaattaagaaaactaaaaaaggatgtaggaagagctgttcaggttttgttcaaagtgatagcaaaagagaatctgtgtgtaataaagcagatgctgaaagtgaacctgttgcacaaaaaagtcagcttgatagaactgtctgcatttctgatgctggagcatgtggtgagaccctcagtgtgaccagtgaagaaaacagccttgtaaaaaaaaaagaaagatcattgagttcaggatcaaatttttgttctgaacaaaaaacttctggcatcataaacaaattttgttcagccaaagactcagaacacaacgagaagtatgaggatacctttttagaatctgaagaaatcggaacaaaagtagaagttgtggaaaggaaagaacatttgcatactgacattttaaaacgtggctctgaaatggacaacaactgctcaccaaccaggaaagacttcactggtgagaaaatatttcaagaagataccatcccacgaacacagatagaaagaaggaaaacaagcctgtatttttccagcaaatataacaaagaagctcttagccccccacgacgtaaagcctttaagaaatggacacctcctcggtcaccttttaatctcgttcaagaaacactttttcatgatccatggaagcttctcatcgctactatatttctcaatcggacctcaggcaaaatggcaatacctgtgctttggaagtttctggagaagtatccttcagctgaggtagcaagaaccgcagactggagagatgtgtcagaacttcttaaacctcttggtctctacgatcttcgggcaaaaaccattgtcaagttctcagatgaatacctgacaaagcagtggaagtatccaattgagcttcatgggattggtaaatatggcaacgactcttaccgaattttttgtgtcaatgagtggaagcaggtgcaccctgaagaccacaaattaaataaatatcatgactggctttgggaaaatcatgaaaaattaagtctatcttaaactctgcagctttcaagctcatctgttatgcatagctttgcacttcaaaaaagcttaattaagtacaaccaaccacctttccagccatagagattttaattagcccaactagaagcctagtgtgtgtgctttcttaatgtgtgtgccaatggtggatctttgctactgaatgtgtttgaacatgttttgagatttttttaaaataaattattatttgacaacaatccaaaaaaaatacggcttttccaatgatgaaatataatcagaagatgaaaaatagttttaaactatcaataatacaaagcaaatttctatcagccttgctaaagctaggggcccactaaatatttttatcggctaggcgtggtggtgcatgcctgtaatctcggaaggctgaggcaggaggatcatttgagctcatgagggcccaggaggtcaaggcttcagtgagccatgatcatgccactgcactccagtctggatgacagagagagaccctgtctcaaaaaatatatatttaaaaaataaaaataaaagctgaccccaaagac

SEQ ID NO: 278 - protein, 580 aa, Human
MGTTGLESLSLGDRGAAPTVTSSERLVPDPPNDLRKEDVAMELERVGEDEEQMMIKRSSECNPLLQEPIASAQFGATAGTECRKSVPCGWERVVKQRLFGKTAGRFDVYFISPQGLKFRSKSSLANYLHKNGETSLKPEDFDFTVLSKRGIKSRYKDCSMAALTSHLQNQSNNSNWNLRTRSKCKKDVFMPPSSSSELQESRGLSNFTSTHLLLKEDEGVDDVNFRKVRKPKGKVTILKGIPIKKTKKGCRKSCSGFVQSDSKRESVCNKADAESEPVAQKSQLDRTVCISDAGACGETLSVTSEENSLVKKKERSLSSGSNFCSEQKTSGIINKFCSAKDSEHNEKYEDTFLESEEIGTKVEVVERKEHLHTDILKRGSEMDNNCSPTRKDFTGEKIFQEDTIPRTQIERRKTSLYFSSKYNKEALSPPRRKAFKKWTPPRSPFNLVQETLFHDPWKLLIATIFLNRTSGKMAIPVLWKFLEKYPSAEVARTADWRDVSELLKPLGLYDLRAKTIVKFSDEYLTKQWKYPIELHGIGKYGNDSYRIFCVNEWKQVHPEDHKLNKYHDWLWENHEKLSLS

SEQ ID NO: 279 - DNA, 2052 bp, Human
tgtgtgtgtgctcacacccacacgtgtgactttgcacgcatttgtctttgagagagagataatagtttttgtttttctttcagtagccaaagtttaaaccattgctttttctttgattctatcgcttttaaggtgatctttcttaacacaggataagaaagcagtaatgtcctaaagaatgctgttgaattaattagtatcagcctctcctacagttctggaaggatacgtggttaagtaccactcctggatgaatcagaaaaacagccacttgagcaatttcgtgttctgtggttcagatgagaatcccagttgagaaagtaagaaaatatgtgtttattcttcagctttaaattgttatatcacaaacttccttcctccttggcaagctttcttttttgacgagaagaaaattgtaataaacaacagtatgactaatagatagtcacatggttacttccagtttgcaaaatgctatttatactttgagttactcttcaaaagtggtatacctctagtttggagctgtgctgtaaaaacaagagtaacatttttatattaaagttaaataaagttacaactttgaagagagtttctgcaagacatgacacaaagctgctagcagaaaatcaaaacgctgattaaaagaagcacggtatgatgaccaaacataaaaagtgttttataattgttggtgttttaataacaactaatattattactctgatagttaaactaactcgagattctcagagtttatgcccctatgattggattggtttccaaaacaaatgctattatttctctaaagaagaaggagattggaattcaagtaaatacaactgttccactcaacatgccgacctaactataattgacaacatagaagaaatgaattttcttaggcggtataaatgcagttctgatcactggattggactgaagatggcaaaaaatcgaacaggacaatgggtagatggagctacatttaccaaatcgtttggcatgagagggagtgaaggatgtgcctacctcagcgatgatggtgcagcaacagctagatgttacaccgaaagaaaatggatttgcaggaaaagaatacactaagttaatgtctaagataatggggaaaatagaaaataacattattaagtgtaaaaccagcaaagtacttttttaattaaacaaagttcgagttttgtacctgtctggttaattctgcttacgtgtcaggctacacataaaagccacttcaaagattggcaaaaaatggttacaggtattctgctgagtttttttctttctttctttctctctctctctttctttctttctttctttctttctttttttaactgtaaaccagaaaacaattgtggggatcaaggacagacatagcacttagacaggactttcatgacccaatatggaacaatttgagtaccagaataggagattatggcctattgaacaaaatgtgaaactgggagtccacaaagacataaatggaaagatgaagtacctcctgacagagcaagaatggcactgaacaatgttatatggacaatggctattttattcaagactattacaatagggaaaagagactaggactcagtctgaactgaaatctgtcaaaacaaaggggggtggggctttaagagtgaaggtgaggaggagatcacacaccgtatgtgtttgctaactggctttacccaaaagaaaattaaactttctttgatctgtacaagttgatcaaacaaatggggtcattcttgtcatatgcaactaaaacagggtagacaggccaggggaaaaaggcactcagggcacacagcattgcttcaaaatataattctctacaaacctagttgctaaaactacctgttgtaacctaaaaccagttttatctaacagctattaaaacaacctactgtgactgcaaaactggttttacccaccactgtcacacaccaatcagaacttgccagctcctcaaaactttactagggccaataaactttctttcaaaacaataaaaaaaaaaaaaaa

SEQ ID NO: 280 - DNA, 1702 bp, Human
agactcaacaagagctccagcaaagactttcactgtagcttgacttgacctgagattaactagggaatcttgagaataaagatgagctctgaaaattgtttcgtagcagagaacagctctttgcatccggagagtggacaagaaaatgatgccaccagtccccatttctcaacacgtcatgaagggtccttccaagttcctgtcctgtgtgctgtaatgaatgtggtcttcatcaccattttaatcatagctctcattgccttatcagtgggccaatacaattgtccaggccaatacacattctcaatgccatcagacagccatgtttcttcatgctctgaggactgggttggctaccagaggaaatgctactttatttctactgtgaagaggagctggacttcagcccaaaatgcttgttctgaacatggtgctactcttgctgtcattgattctgaaaaggacatgaactttctaaaacgatacgcaggtagagaggaacactgggttggactgaaaaaggaacctggtcacccatggaagtggtcaaatggcaaagaatttaacaactggttcaacgttacagggtctgacaagtgtgtttttctgaaaaacacagaggtcagcagcatggaatgtgagaagaatttatactggatatgtaacaaaccttacaaataataaggaaacatgttcacttattgactattatagaatggaactcaaggaaatctgtgtcagtggatgctgctctgtggtccgaagtcttccatagagactttgtgaaaaaaaattttatagtgtcttgggaattttcttccaaacagaactatggaaaaaaaggaagaaattccaggaaaatctgcactgtgggcttttattgccatgagctagaagcatcacaggttgaccaataaccatgcccaagaatgagaagaatgactatgcaacctttggatgcactttatattattttgaatccagaaataatgaaataactaggcgtggacttactatttattgctgaatgactaccaacagtgagagcccttcatgcatttgcactactggaaggagttagatgttggtactagatactgaatgtaaacaaaggaattatggctggtaacataggtttttagtctaattgaatcccttaaactcagggagcatttataaatggacaaatgcttatgaaactaagatttgtaatatttctctctttttagagaaatttgccaatttactttgttatttttccccaaaaagaatgggatgatcgtgtatttatttttttacttcctcagctgtagacaggtccttttcgatggtacatatttctttgcctttataatcttttatacagtgtcttacagagaaaagacataagcaaagactatgaggaatatttgcaagacatagaatagtgttggaaaatgtgcaatatgtgatgtggcaaatctctattaggaaatattctgtaatcttcagacctagaataatactagtcttataataggtttgtgactttcctaaatcaattctattacgtgcaatacttcaatacttcatttaaaatatttttatgtgcaataaaatgtatttgtttgtattttgtgttcagtacaattataagctgtttttatatatgtgaaataaaagtagaataaacacaaaaaaaaaaaaaaaaaaaaaaaaaaaa

SEQ ID NO: 281 - protein, 199 aa, Human
MSSENCFVAENSSLHPESGQENDATSPHFSTRHEGSFQVPVLCAVMNVVFITILIIALIALSVGQYNCPGQYTFSMPSDSHVSSCSEDWVGYQRKCYFISTVKRSWTSAQNACSEHGATLAVIDSEKDMNFLKRYAGREEHWVGLKKEPGHPWKWSNGKEFNNWFNVTGSDKCVFLKNTEVSSMECEKNLYWICNKPYK

SEQ ID NO: 282 - DNA, 2041 bp, Human
gccacttcttctgggcccacgaggcagctgtcccatgctctgctgagcacggtggtgccatgcctctgcaactcctcctgttgctgatcctactgggccctggcaacagcttgcagctgtgggacacctgggcagatgaagccgagaaagccttgggtcccctgcttgcccgggaccggagacaggccaccgaatatgagtacctagattatgatttcctgccagaaacggagcctccagaaatgctgaggaacagcactgacaccactcctctgactgggcctggaacccctgagtctaccactgtggagcctgctgcaaggcgttctactggcctggatgcaggaggggcagtcacagagctgaccacggagctggccaacatggggaacctgtccacggattcagcagctatggagatacagaccactcaaccagcagccacggaggcacagaccactccactggcagccacagaggcacagacaactcgactgacggccacggaggcacagaccactccactggcagccacagaggcacagaccactccaccagcagccacggaagcacagaccactcaacccacaggcctggaggcacagaccactgcaccagcagccatggaggcacagaccactgcaccagcagccatggaagcacagaccactccaccagcagccatggaggcacagaccactcaaaccacagccatggaggcacagaccactgcaccagaagccacggaggcacagaccactcaacccacagccacggaggcacagaccactccactggcagccatggaggccctgtccacagaacccagtgccacagaggccctgtccatggaacctactaccaaaagaggtctgttcatacccttttctgtgtcctctgttactcacaagggcattcccatggcagccagcaatttgtccgtcaactacccagtgggggccccagaccacatctctgtgaagcagtgcctgctggccatcctaatcttggcgctggtggccactatcttcttcgtgtgcactgtggtgctggcggtccgcctctcccgcaagggccacatgtaccccgtgcgtaattactcccccaccgagatggtctgcatctcatccctgttgcctgatgggggtgaggggccctctgccacagccaatgggggcctgtccaaggccaagagcccgggcctgacgccagagcccagggaggaccgtgagggggatgacctcaccctgcacagcttcctcccttagctcactctgccatctgttttggcaagaccccacctccacgggctctcctgggccacccctgagtgcccagaccccaatccacagctctgggcttcctcggagacccctggggatggggatcttcagggaaggaactctggccacccaaacaggacaagagcagcctggggccaagcagacgggcaagtggagccacctctttcctccctccgcggatgaagcccagccacatttcagccgaggtccaaggcaggaggccatttacttgagacagattctctcctttttcctgtcccccatcttctctgggtccctctaacatctcccatggctctccccgcttctcctggtcactggagtctcctccccatgtacccaaggaagatggagctcccccatcccacacgcactgcactgccattgtcttttggttgccatggtcaccaaacaggaagtggacattctaagggaggagtactgaagagtgacggacttctgaggctgtttcctgctgctcctctgacttggggcagcttgggtcttcttgggcacctctctgggaaaacccagggtgaggttcagcctgtgagggctgggatgggtttcgtgggcccaaagggcagacctttctttgggactgtgtggaccaaggagcttccatctagtgacaagtgacccccagctatcgcctcttgccttcccctgtggccactttccagggtggactctgtcttgttcactgcagtatcccaactgcaggtccagtgcaggca

SEQ ID NO: 283 - protein, 402 aa, Human
MPLQLLLLLILLGPGNSLQLWDTWADEAEKALGPLLARDRRQATEYEYLDYDFLPETEPPEMLRNSTDTTPLTGPGTPESTTVEPAARRSTGLDAGGAVTELTTELANMGNLSTDSAAMEIQTTQPAATEAQTTPLAATEAQTTRLTATEAQTTPLAATEAQTTPPAATEAQTTQPTGLEAQTTAPAAMEAQTTAPAAMEAQTTPPAAMEAQTTQTTAMEAQTTAPEATEAQTTQPTATEAQTTPLAAMEALSTEPSATEALSMEPTTKRGLFIPFSVSSVTHKGIPMAASNLSVNYPVGAPDHISVKQCLLAILILALVATIFFVCTVVLAVRLSRKGHMYPVRNYSPTEMVCISSLLPDGGEGPSATANGGLSKAKSPGLTPEPREDREGDDLTLHSFLP

SEQ ID NO: 284 - DNA, 1324 bp, Human
cttgagaggctctggctcttgcttcttaggcggcccgaggacgccatggccgagtgcccgacactcggggaggcagtcaccgaccacccggaccgcctgtgggcctgggagaagttcgtgtatttggacgagaagcagcacgcctggctgcccttaaccatcgagataaaggataggttacagttacgggtgctcttgcgtcgggaagacgtcgtcctggggaggcctatgacccccacccagataggcccaagcctgctgcctatcatgtggcagctctaccctgatggacgataccgatcctcagactccagtttctggcgcttagtgtaccacatcaagattgacggcgtggaggacatgcttctcgagctgctgccagatgactgatgtatggtcttggcagcacctgtctcctttcaccccagggcctgagcctggccagcctacaatggggatgttgtgtttctgttcaccttcgtttactatgcctgtgtcttctccaccacgctggggtctgggaggaatggacagacagaggatgagctctacccagggcctgcaggacctgcctgtagcccactctgctcgccttagcactaccactcctgccaaggaggattccatttggcagagcttcttccaggtgcccagctatacctgtgcctcggcttttctcagctggatgatggtcttcagcctctttctgtcccttctgtccctcacagcactagtatttcatgttgcacacccactcagctccgtgaacttgtgagaacacagccgattcacctgagcaggacctctgaaaccctggaccagtggtctcacatggtgctacgcctgcatgtaaacacgcctgcaaacgctgcctgccggtaaacacgcctgcaaacgctgcctgcccgtaaacacgcctgcaaacgctgcctgcccacacaggttcacgtgcagctcaaggaaaggcctgaaaggagcccttatctgtgctcaggactcagaagcctctgggtcagtggtccacatcccgggacgcagcaggaggccaggccggcgagccctgtggatgagccctcagaacccttggcttgcccacgtggaaaagggatagaggttgggtttcccccctttatagatggtcacgcacctgggtgttacaaagttgtatgtggcatgaatactttttgtaatgattgattaaatgcaagatagtttatctaacttcgtgcgcaatcagcttctatccttgacttagattctggtggagagaagtgagaataggcagcccccaaataaaaaatattcatggaaaaaaaaaaaaaaa

SEQ ID NO: 285 - protein, 114 aa, Human
MAECPTLGEAVTDHPDRLWAWEKFVYLDEKQHAWLPLTIEIKDRLQLRVLLRREDVVLGRPMTPTQIGPSLLPIMWQLYPDGRYRSSDSSFWRLVYHIKIDGVEDMLLELLPDD

SEQ ID NO: 286 - DNA, 4743 bp, Human
  unsure 3383: unknown base
  unsure 3384: unknown base
  unsure 3385: unknown base
  unsure 3386: unknown base
  unsure 3387: unknown base
  unsure 3388: unknown base
  unsure 3389: unknown base
  unsure 3390: unknown base
  unsure 3391: unknown base
  unsure 3392: unknown base
  unsure 3393: unknown base
  unsure 3394: unknown base
  unsure 3395: unknown base
  unsure 3396: unknown base
  unsure 3397: unknown base
  unsure 3398: unknown base
  unsure 3399: unknown base
  unsure 3400: unknown base
  unsure 3401: unknown base
  unsure 3402: unknown base
  unsure 3403: unknown base
  unsure 3404: unknown base
  unsure 3405: unknown base
  unsure 3406: unknown base
  unsure 3407: unknown base
  unsure 3408: unknown base
  unsure 3409: unknown base
  unsure 3410: unknown base
  unsure 3411: unknown base
  unsure 3412: unknown base
  unsure 3413: unknown base
  unsure 3414: unknown base
  unsure 3415: unknown base
  unsure 3416: unknown base
  unsure 3417: unknown base
  unsure 3418: unknown base
  unsure 3419: unknown base
  unsure 3420: unknown base
  unsure 3421: unknown base
  unsure 3422: unknown base
  unsure 3423: unknown base
  unsure 3424: unknown base
  unsure 3425: unknown base
  unsure 3426: unknown base
  unsure 3427: unknown base
  unsure 3428: unknown base
  unsure 3429: unknown base
  unsure 3430: unknown base
  unsure 3431: unknown base
  unsure 3432: unknown base
  unsure 3433: unknown base
  unsure 3434: unknown base
  unsure 3435: unknown base
  unsure 3436: unknown base
  unsure 3437: unknown base
gaattccgccagccccgccagtccccgcgcagtccccgcgcagtcccagcgccaccgggcagcagcggcgccgtgctcgctccagggcgcaaccatgtcgccatttcttcggattggcttgtccaactttgactgcgggtcctgccagtcttgtcagggcgaggctgttaacccttactgtgctgtgctcgtcaaagagtatgtcgaatcagagaacgggcagatgtatatccagaaaaagcctaccatgtacccaccctgggacagcacttttgatgcccatatcaacaagggaagggtcatgcagatcattgtgaaaggcaaaaacgtggacctcatctctgaaaccaccgtggagctctactcgctggctgagaggtgcaggaagaacaacgggaagacagaaatatggttagagctgaaacctcaaggccgaatgctaatgaatgcaagatactttctggaaatgagtgacacaaaggacatgaatgaatttgagacggaaggcttctttgctttgcatcagcgccggggtgccatcaagcaggcaaaggtccaccacgtcaagtgccacgagttcactgccaccttcttcccacagcccacattttgctctgtctgccacgagtttgtctggggcctgaacaaacagggctaccagtgccgacaatgcaatgcagcaattcacaagaagtgtattgataaagttatagcaaagtgcacaggatcagctatcaatagctgagaaaccatgttccacaaggagagattcaaaattgacatgccacacagatttaaagtctacaattacaagagcccgaccttctgtgaacactgtgggaccctgctgtggggactggcacggcaaggactcaagtgtgatgcatgtggcatgaatgtgcatcatagatgccagacaaaggtggccaacctttgtggcataaaccagaagctaatggctgaagcgctggccatgattgagagcactcaacaggctcgctgcttaagagatactgaacagatcttcagagaaggtccggttgaaattggtctcccatgctccatcaaaaatgaagcaaggccgccatgtttaccgacaccgggaaaaagagagcctcagggcatttcctgggagtctccgttggatgaggtggataaaatgtgccatcttccagaacctgaactgaacaaagaaagaccatctctgcagattaaactaaaaattgaggattttatcttgcacaaaatgttggggaaaggaagttttggcaaggtcttcctggcagaattcaagaaaaccaatcaatttttcgcaataaaggccttaaagaaagatgtggtcttgatggacgatgatgttgagtgcacgatggtagagaagagagttctttccttggcctgggagcatccgtttctgacgcacatgttttgtacattccagaccaaggaaaacctcttttttgtgatggagtacctcaacggaggggacttaatgtaccacatccaaagctgccacaagttcgacctttccagagcgacgttttatgctgctgaaatcattcttggtctgcagttccttcattccaaaggaatagtctacagggacctgaagctagataacatcctgttagacaaagatggacatatcaagatcgcggattttggaatgtgcaaggagaacatgttaggagatgccaagacgaataccttctgtgggacacctgactacatcgccccagagatcttgctgggtcagaaatacaaccactctgtggactggtggtccttcggggttctcctttatgaaatgctgattggtcagtcgcctttccacgggcaggatgaggaggagctcttccactccatccgcatggacaatcccttttacccacggtggctggagaaggaagcaaaggaccttctggtgaagctcttcgtgcgagaacctgagaagaggctgggcgtgaggggagacatccgccagcaccctttgtttcgggagatcaactgggaggaacttgaacggaaggagattgacccaccgttccggccgaaagtgaaatcaccatttgactgcagcaatttcgacaaagaattcttaaacgagaagccccggctgtcatttgccgacagagcactgatcaacagcatggaccagaatatgttcaggaacttttccttcatgaaccccgggatggagcggctgatatcctgaatcttgcccctccagagacaggaaagaatttgccttctccctgggaactggttcaagagacactgcttgggttcctttttcaacttggaaaaagaaagaaacactcaacaataaagactgagacccgttcgcccccatgtgacttttatctgtagcagaaaccaagtctacttcactaatgacgatgccgtgtgtctcgtctcctgacatgtctcacagacgctcctgaagttaggtcattactaaccatagttatttacttgaaagatgggtctccgcacttggaaaggtttcaagacttgatactgcaataaattatggctcttcacctgggcgccaactgctgatcaacgaaatgcttgttgaatcaggggcaaacggagtacagacgtctcaagactgaaacggccccattgcctggtctagtagcggatctcactcagccgcagacaagtaatcactaacccgttttattctattcctatctgtggatgtgtaaatggctggggggccagccctggataggtttttatgggaattctttacaataaacatagcttgtaacttgagatctacaaatccattcatcctgattgggcatgaaatccatggtcaagaggacaagtggaaagtgagagggaaggtttgctagacaccttcgcttgttatcttgtcaagatagaaaagatagtatcatttcacccttgccagtaaaaacctttccatccacccattctcagcagactccagtattggcacagtcactcactgccattctcacactataacaagaaaagaaatgaagtgcataagtctcctgggaaaagaaccttaaccccttctcgtgccatgactggtgatttcatgactcataagcccctccgtaggcatcattcaagatcaatggcccatgcatgctgtttgcagcagtcaattgagttgaattagaattccaaccatacattttaaaggtatttgtgctgtgtgtatattttgataaaatgttgtgacttcatggcaaacaggtggatgtgtaaaaatggaataaaaaaaaaaaaagagtcctcttaatcgtttacttccccgcttgccccccacaagaacttgcttctgctgtgtcagtcctcaaaatgtagctagcattgagatgatgttttacagttggggnnnnnnnnnnnnnnnnnnnnnnnnnnnnnnnnnnnnnnnnnnnnnnnnnnnnnnnaggtagcctttcagttgtttggatgacagttgtctccactggacatctgcttcatgccaggccctctcctgggtgttggtgtgtccactcttccctccaaccaccatattcccttgaggccaggaatggacctaagggtgcctcaggcatgggaagacccgataccggcctctctggagctcgctggcttctggagttctgagttaaggaggtagttgaagagacccatgtatgacccccagatgccagtaaaactaatcatgtgcagggaaggtggtcacgtcaataagattttgaaagcaagattcatcaaaaaataggccagatttgcagtcccacatgaacctgcattgaaccctcattgactatccaggtatgtattactttaaaaaaataaaaactaacataaccttaaaacatattagcaaatttccctgacacactgaaagtaggatattattctaaaatttttcctttatgtatgtagctttttagaaaccctacaaatgtgttttgtgtaaaaggatgtagtctgcaatcattttctgactcttggtgtaataaaaattaagtggcctaattatttaaaagcttgtcgtttgaaattattttttgagaaacagtttaaagcatgatactatttttgcttttcatgtaatgtataagtattcgcagaagctgcttgtatatgtttgtgttccatgtatgaaaatgttgtaaacagggtccatgtatttccccagtgagagttgctgatcttttggctgtaattaccaagtgcttgaggttggggtggctggaaatgaatatcaagcttttcggtgcctggagccaactttgtccaaataaaagagctttgtactgtgaaggaattttactaagtaaattttgtttaaaaaatccacgtgaattaaaggaaaggaaatgaagaagaagatcgtatcaatacgatgatctaaatcagtgttctgcaacttttctacccagtcatcagtgggagtgaatcagtaggaatgtggggaagggagtgaggggagacccccttcttgactcagcagtggtgacggtcggtgtgtcctgcagacctgaagccaagatcaagggggcttgagcaccaggagcccccgcagttgctgaatgaccagcggagggcaggtgccagcctgtggcaaaataggaaagaaaaggacaggatggggacttcaccatttttttcagccttaaattgttccttaaaccttcatgtccttttctctaatgtgtgttcttgtttggtaaaataaaaaagtttgtaaccctgaaaaaa

SEQ ID NO: 287 - protein, 247 aa, Human
NSASPASPRAVPAQSQRHRAAAAPCSLQGATMSPFLRIGLSNFDCGSCQSCQGEAVNPYCAVLVKEYVESENGQMYIQKKPTMYPPWDSTFDAHINKGRVMQIIVKGKNVDLISETTVELYSLAERCRKNNGKTEIWLELKPQGRMLMNARYFLEMSDTKDMNEFETEGFFALHQRRGAIKQAKVHHVKCHEFTATFFPQPTFCSVCHEFVWGLNKQGYQCRQCNAAIHKKCIDKVIAKCTGSAINS

SEQ ID NO: 288 - DNA, 1501 bp, Human
ggggtcggccgggtgctaggccggggccgaggccgaggccggggcgggatccagagcgggagccggcgcgggatctgggactcggagcgggatccggagcgggacccaggagccggcgcggggccatggcgaggcgcgggccagggtggcggccgcttctgctgctcgtgctgctggcgggcgcggcgcagggcggcctctacttccgccggggacagacctgctaccggcctctgcggggggacgggctggctccgctggggcgcagcacatacccccggcctcatgagtacctgtccccagcggatctgcccaagagctgggactggcgcaatgtggatggtgtcaactatgccagcatcacccggaaccagcacatcccccaatactgcggctcctgctgggcccacgccagcaccagcgctatggcggatcggatcaacatcaagaggaagggagcgtggccctccaccctcctgtccgtgcagaacgtcatcgactgcggtaacgctggctcctgtgaagggggtaatgacctgtccgtgtgggactacgcccaccagcacggcatccctgacgagacctgcaacaactaccaggccaaggaccaggagtgtgacaagtttaaccaatgtgggacatgcaatgaattcaaagagtgccacgccatccggaactacaccctctggagggtgggagactacggctccctctctgggagggagaagatgatggcagaaatctacgcaaatggtcccatcagctgtggaataatggcaacagaaagactggctaactacaccggaggcatctatgccgaataccaggacaccacatatataaaccatgtcgtttccgtggctgggtggggcatcagtgatgggactgagtactggattgtccggaattcatggggtgaaccatggggcgagagaggctggctgaggatcgtgaccagcacctataaggatgggaagggcgccagatacaaccttgccatcgaggagcactgtacatttggggaccccatcgtttaaggccatgtcactagaagcgcagtttaagaaaaggcatggtgacccatgaccagaggggatcctatggttatgtgtgccaggctggctggcaggaactggggtggctatcaatattggatggcgaggacagcgtggtactggctgcgagtgttcctgagagttgaaagtgggatgacttatgacacttgcacagcatggctctgcctcacaatgatgcagtcagccacctggtgaagaagtgacctgcaacacaggaaacgatgggacctcagtcttcttcagcagaggacttgatattttgtatttggcaactgtgggcaataatatggcatttaagaggtgaaagagttcagacttatcaccattcttatgtcactttagaatcaagggtgggggagggagggagggagttggcagtttcaaatcgcccaagtgatgaataaagtatctggctctgcacgaga

SEQ ID NO: 289 - protein, 303 aa, Human
MARRGPGWRPLLLLVLLAGAAQGGLYFRRGQTCYRPLRGDGLAPLGRSTYPRPHEYLSPADLPKSWDWRNVDGVNYASITRNQHIPQYCGSCWAHASTSAMADRINIKRKGAWPSTLLSVQNVIDCGNAGSCEGGNDLSVWDYAHQHGIPDETCNNYQAKDQECDKFNQCGTCNEFKECHAIRNYTLWRVGDYGSLSGREKMMAEIYANGPISCGIMATERLANYTGGIYAEYQDTTYINHVVSVAGWGISDGTEYWIVRNSWGEPWGERGWLRIVTSTYKDGKGARYNLAIEEHCTFGDPIV

SEQ ID NO: 290 - DNA, 684 bp, Human
cattcccagcctcacatcactcacaccttgcatttcacccctgcatcccagtcgccctgcagcctcacacagatcctgcacacacccagacagctggcgctcacacattcaccgttggcctgcctctgttcaccctccatggccctgctactggccctcagcctgctggttctctggacttccccagccccaactctgagtggcaccaatgatgctgaagactgctgcctgtctgtgacccagaaacccatccctgggtacatcgtgaggaacttccactaccttctcatcaaggatggctgcagggtgcctgctgtagtgttcaccacactgaggggccgccagctctgtgcacccccagaccagccctgggtagaacgcatcatccagagactgcagaggacctcagccaagatgaagcgccgcagcagttaacctatgaccgtgcagagggagcccggagtccgagtcaagcattgtgaattattacctaacctggggaaccgaggaccagaaggaaggaccaggcttccagctcctctgcaccagacctgaccagccaggacagggcctggggtgtgtgtgagtgtgagtgtgagcgagagggtgagtgtggtcagagtaaagctgctccacccccagattgcaatgctaccaataaagccgcctggtgtttacaactaa

SEQ ID NO: 291 - DNA, 2086 bp, Human
ccgccgccgcgcgccagagagaagcagcctccggccgcggcggcccctgtctcccgaccccggaaggcgaagcaggctgcccggggaccccgcgcgtgggcgcttgaagccgagaccagcctgcccgggcctgggcaggcggagcagggccttggaccccgcggcgcccctcggcctcggagcaacgagcgcagcgccgcctctgaagagccaatccattcaggatgggaaaccacgcaggcaaacgagaattaaatgccgagaaggccagtacgaatagtgaaactaacagaggagaatctgaaaaaaagagaaacctgggtgaactttcacggacaacctcagaggacaacgaagtgttcggagaggcagatgcgaaccagaacaatgggacctcctctcaggacacagcggtgactgactccaagcgcacagcggacccgaagaatgcctggcaggatgcccacccagctgacccagggagccgcccccacttgatccgcctcttttcccgagatgccccggggagggaggacaacaccttcaaagacaggccctctgagtccgacgagctccagaccatccaagaagacagtgcagccacctccgagagcctggatgtgatggcgtcacagaagagaccctcccagaggcacggatccaagtacctggccacagcaagtaccatggaccatgccaggcatggcttcctcccaaggcacagagacacgggcatccttgactccatcgggcgcttctttggcggtgacaggggtgcgcccaagcggggctctggcaaggtgagctctgaggagtagaggagttttagtttaaatggaaaaagcaaaggagaaatcagtaggtgaactcagccattagaggaagaactggcacgtagcctcttgctgtctaaggtctcgttccgtgctggagaatgcatatgagcccaagagtgtgggcctgagtggctgcttaggacgttttcgtttaactcaccccctcttttcctcacaagggatggtggccggggtgtggctcaggaatgtaaggacatgctgaattctggatctctaagggtgcctggacatgggcgttgcagaaagagagccacattctcagggtctctggtggtgtgtgcttgcggacttgatgactgatgttgcctctgcagcccacacgctggggttcaacactgggttatgctcgttttttcctggagtcagtgctgctagcttcatgttgctctgcgacaatcataggattgaggtcgaggaagacttttgaacaaactcctcaatttaaatccgccttgagcaaacgttctctgtggtctgagaagtggaaggggggagggataaatgagtgtctatgaatcaaagctttattatcttgtgattccattaatttgcatacagagtcttagaagtttctttattcaaaagcaaatgtggataaaaatgtattacaaaaaaaaaaaaactctgctatggggtccagagtctaggaggggttcctgcagttgattggtcagtggagaacctgtggctgctggttcatcaaagcgctggtccctgagtgccattcagattgcagatgcagtatttaacgtgatgtttagagtgttggggggtggtgtaatttgggagagaaagaagtttttcccaaaaaagtccctagtttatggggtgttctcacacaacctgtaagatgaagctgtttttctgcctgtgtgcagggctgattctggaattccagaaggccttgtgggagcgtaaaaggctttggaataacgtgtggaacagagcgcctcattctgataacatgcaatcataaaaaccatagggcaactgggagttaaggagtttctagaattggctttagtctccaactgcaattctttattgatcatgaaattgttgaagagaaacacaaatgtcagttttacctttcctgtgggcgtgaaagcacatcgaagtttcaggcaactgttaacatctctaccatctgtctgagttgagatttcaggttgtgacacttgccgtgacttatttgtaaatgacattttgtgtgtcttagatactaatgg

SEQ ID NO: 292 - protein, 197 aa, Human
MGNHAGKRELNAEKASTNSETNRGESEKKRNLGELSRTTSEDNEVFGEADANQNNGTSSQDTAVTDSKRTADPKNAWQDAHPADPGSRPHLIRLFSRDAPGREDNTFKDRPSESDELQTIQEDSAATSESLDVMASQKRPSQRHGSKYLATASTMDHARHGFLPRHRDTGILDSIGRFFGGDRGAPKRGSGKVSSEE

SEQ ID NO: 293 - DNA, 994 bp, Human
cgttgctgtcgaaatgaagtgcgcgctgcgacacctcccagcccaccgaactccgccgccatttcctcgcttggcctaacggttcggccaatcccagcgcgcatcaagaaggactgaggctccgccaatcggaggccgccgatttcgacccttcgcctcggcccggcccaatccaggccccggccccgccgcccccggcccgcccccgcggtgccctctctcctccctctttgtgcgtctcgcgccgccgccgcccgccgcgtgagaggacgggctccgcgcgctccggcagcgcattcgggtcccctccccccgggaggcttgcgaaggagaagccgccgcagaggaaaagcaggtgccggtgcctgtccccgggggcgccatggcgaccggagcgaacgccacgccgttggacttcccaagtaagaagcggaagaggagccgctggaaccaagacacaatggaacagaagacagtgattccaggaatgcctacagttattccccctggacttactcgagaacaagaaagagcttatataggtaaatatacgttctgcatccaaatgcactttgagattgttacgatttattctgagcaagatctgcattttttgaaagtttgagattgtagttatcttttttgagatgagatactttcacgactttggtatcatctgtcagtttttgcccagtgagttctgcatttgcagctccttgttttggtctgttcgtaactgcagtgttctccatgagtatcaggaaggtagggtttcacttaggagtaagaacagtccccagtccagcagccacccttttcagctgctgttcattgccagttgatgaggtgagtgtcatctgcctctctggacaggccccagtggagaacaccgcaggtactgtaaaccaagtacttttcacagcgtggcctttcaccataattttatatttctccccctaaaatgtggtcttttactttttataggtactttctg

SEQ ID NO: 294 - protein, 80 aa, Human
MATGANATPLDFPSKKRKRSRWNQDTMEQKTVIPGMPTVIPPGLTREQERAYIGKYTFCIQMHFEIVTIYSEQDLHFLKV

SEQ ID NO: 295 - DNA, 4654 bp, Human
gaattcctgccactcttcctgcaacggcccaggagctcagagctccacatctgaccttctagtcatgaccaggaccagggcagcactcctcctgttcacagccttagcaacttctctaggtttcaacttggacacagaggagctgacagccttccgtgtggacagcgctgggtttggagacagcgtggtccagtatgccaactcctgggtggtggttggagccccccaaaagataacagctgccaaccaaacgggtggcctctaccagtgtggctacagcactggtgcctgtgagcccatcggcctgcaggtgcccccggaggccgtgaacatgtccctgggcctgtccctggcgtctaccaccagcccttcccagctgctggcctgcggccccaccgtgcaccacgagtgcgggaggaacatgtacctcaccggactctgcttcctcctgggccccacccagctcacccagaggctcccggtgtccaggcaggagtgcccaagacaggagcaggacattgtgttcctgatcgatggctcaggcagcatctcctcccgcaactttgccacgatgatgaacttcgtgagagctgtgataagccagttccagagacccagcacccagttttccctgatgcagttctccaacaaattccaaacacacttcactttcgaggaattcaggcgcacgtcaaaccccctcagcctgttggcttctgttcaccagctgcaagggtttacatacacggccaccgccatccaaaatgtcgtgcaccgattgttccatgcctcatatggggcccgtagggatgccaccaaaattctcattgtcatcactgatgggaagaaagaaggcgacagcctggattataaggatgtcatccccatggctgatgcagcaggcatcatccgctatgcaattggggttggattagcttttcaaaacagaaattcttggaaagaattaaatgacattgcatcgaagccctcccaggaacacatatttaaagtggaggactttgatgctctgaaagatattcaaaaccaactgaaggagaagatctttgccattgagggtacggagaccacaagcagtagctccttcgaattggagatggcacaggagggcttcagcgctgtgttcacacctgatggccccgttctgggggctgtggggagcttcacctggtctggaggtgccttcctgtaccccccaaatatgagccctaccttcatcaacatgtctcaggagaatgtggacatgagggactcttacctgggttactccaccgagctggccctctggaaaggggtgcagagcctggtcctgggggccccccgctaccagcacaccgggaaggctgtcatcttcacccaggtgtccaggcaatggaggatgaaggccgaagtcacggggactcagatcggctcctacttcggggcctccctctgctccgtggacgtagacaccgacggcagcaccgacctggtcctcatcggggccccccattactacgagcagacccgagggggccaggtgtctgtgtgtcccttgcccagggggtggagaaggtggtggtgtgatgctgttctctacggggagcagggccacccctggggtcgctttggggcggctctgacagtgctgggggatgtgaatggggacaagctgacagacgtggtcatcggggccccaggagaggaggagaaccggggtgctgtctacctgtttcacggagtcttgggacccagcatcagcccctcccacagccagcggatcgcgggctcccagctctcctccaggctgcagtattttgggcaggcactgagcgggggtcaagacctcacccaggatggactggtggacctggctgtgggggcccggggccaggtgctcctgctcaggaccagacctgtgctctgggtgggggtgagcatgcagttcatacctgccgagatccccaggtctgcgtttgagtgtcgggagcaggtggtctctgagcagaccctggtacagtccaacatctgcctttacattgacaaacgttctaagaacctgcttgggagccgtgacctccaaagctctgtgaccttggacctggccctcgaccctggccgcctgagtccccgtgccaccttccaggaaacaaagaaccggagtctgagccgagtccgagtcctcgggctgaaggcacactgtgaaaacttcaacctgctgctcccgagctgcgtggaggactctgtgacccccattaccttgcgtctgaacttcacgctggtgggcaagcccctccttgccttcagaaacctgcggcctatgctggccgcactggctcagagatacttcacggcctccctaccctttgagaagaactgtggagccgaccatatctgccaggacaatctcggcatctccttcagcttcccaggcttgaagtccctgctggtggggagtaacctggagctgaacgcagaagtgatggtgtggaatgacggggaagactcctacggaaccaccatcaccttctcccaccccgcaggactgtcctaccgctacgtggcagagggccagaaacaagggcagctgcgttccctgcacctgacatgtgacagcgccccagttgggagccagggcacctggagcaccagctgcagaatcaaccacctcatcttccgtggcggcgcccagatcaccttcttggctacctttgacgtctcccccaaggctgtcctgggagaccggctgcttctgacagccaatgtgagcagtgagaacaacactcccaggaccagcaagaccaccttccagctggagctcccggtgaagtatgctgtctacactgtggttagcagccacgaacaattcaccaaatacctcaacttctcagagtctgaggagaaggaaagccatgtggccatgcacagataccaggtcaataacctgggacagagggacctgcctgtcagcatcaacttctgggtgcctgtggagctgaaccaggaggctgtgtggatggatgtggaggtctcccacccccagaacccatcccttcggtgctcctcagagaaaatcgcacccccagcatctgacttcctggcgcacattcagaagaatcccgtgctggactgctccattgctggctgcctgcggttccgctgtgacgtcccctccttcagcgtccaggaggagctggatttcaccctgaagggcaacctcagctttggctgggtccgccagatattgcagaagaaggtgtcggtcgtgagtgtggctgaaattacgttcgacacatccgtgtactcccagcttccaggacaggaggcatttatgagagctcagacgacaacggtgctggagaagtacaaggtccacaaccccacccccctcatcgtaggcagctccattgggggtctgttgctgctggcactcatcacagcggtactgtacaaagttggcttcttcaagcgtcagtacaaggaaatgatggaggaggcaaatggacaaattgccccagaaaacgggacacagacccccagcccgcccagtgagaaatgatccctctttgccttggacttcttctcccgcgattttccccacttacttaccctcacctgtcaggctgacggggaggaaccactgcaccaccgagagaggctgggatgggcctgcttcctgtctttgggagaaaacgtcttgcttgggaaggggcctttgtcttgtcaaggttccaactggaaacccttaggacagggtccctgctgtgttccccaaaaggacttgacttgcaatttctacctagaaatacatggacaatacccccaggcctcagtctcccttctcccatgaggcacgaatgatctttctttcctttccttttttttttttttcttttctttttttttttttttgagacggagtctcgctctgtcacccaggctggagtgcaatggcgtgatctcggctcgctgcaacctccgcctcccgggttcaagtaattctgctgtctcagcctcctgcgtagctgggactacaggcacacgccacctcgcccggcccgatctttctaaaatacagttctgaatatgctgctcatccccacctgtcttcaacagctccccattaccctcaggacaatgtctgaactctccagcttcgcgtgagaagtccccttccatcccagagggtgggcttcagggcgcacagcatgagagcctctgtgcccccatcaccctcgtttccagtgaattagtgtcatgtcagcatcagctcagggcttcatcgtggggctctcagttccgattccccaggctgaattgggagtgagatgcctgcatgctgggttctgcacagctggcctcccgcggttgggtcaacattgctggcctggaagggaggagcgccctctagggagggacatggccccggtgcggctgcagctcaccagccccaggggcagaagagacccaaccacttcctattttttgaggctatgaatatagtacctgaaaaaatgccaagcactagattatttttttaaaaagcgtactttaaatgtttgtgttaatacacattaaaacatcgcacaaaaacgatgcatctaccgctccttgggaaataatctgaaaggtctaaaaataaaaaagccttctgtgg

SEQ ID NO: 296 - protein, 1163 aa, Human
MTRTRAALLLFTALATSLGFNLDTEELTAFRVDSAGFGDSVVQYANSWVVVGAPQKITAANQTGGLYQCGYSTGACEPIGLQVPPEAVNMSLGLSLASTTSPSQLLACGPTVHHECGRNMYLTGLCFLLGPTQLTQRLPVSRQECPRQEQDIVFLIDGSGSISSRNFATMMNFVRAVISQFQRPSTQFSLMQFSNKFQTHFTFEEFRRTSNPLSLLASVHQLQGFTYTATAIQNVVHRLFHASYGARRDATKILIVITDGKKEGDSLDYKDVIPMADAAGIIRYAIGVGLAFQNRNSWKELNDIASKPSQEHIFKVEDFDALKDIQNQLKEKIFAIEGTETTSSSSFELEMAQEGFSAVFTPDGPVLGAVGSFTWSGGAFLYPPNMSPTFINMSQENVDMRDSYLGYSTELALWKGVQSLVLGAPRYQHTGKAVIFTQVSRQWRMKAEVTGTQIGSYFGASLCSVDVDTDGSTDLVLIGAPHYYEQTRGGQVSVCPLPRGWRRWWCDAVLYGEQGHPWGRFGAALTVLGDVNGDKLTDVVIGAPGEEENRGAVYLFHGVLGPSISPSHSQRIAGSQLSSRLQYFGQALSGGQDLTQDGLVDLAVGARGQVLLLRTRPVLWVGVSMQFIPAEIPRSAFECREQVVSEQTLVQSNICLYIDKRSKNLLGSRDLQSSVTLDLALDPGRLSPRATFQETKNRSLSRVRVLGLKAHCENFNLLLPSCVEDSVTPITLRLNFTLVGKPLLAFRNLRPMLAALAQRYFTASLPFEKNCGADHICQDNLGISFSFPGLKSLLVGSNLELNAEVMVWNDGEDSYGTTITFSHPAGLSYRYVAEGQKQGQLRSLHLTCDSAPVGSQGTWSTSCRINHLIFRGGAQITFLATFDVSPKAVLGDRLLLTANVSSENNTPRTSKTTFQLELPVKYAVYTVVSSHEQFTKYLNFSESEEKESHVAMHRYQVNNLGQRDLPVSINFWVPVELNQEAVWMDVEVSHPQNPSLRCSSEKIAPPASDFLAHIQKNPVLDCSIAGCLRFRCDVPSFSVQEELDFTLKGNLSFGWVRQILQKKVSVVSVAEITFDTSVYSQLPGQEAFMRAQTTTVLEKYKVHNPTPLIVGSSIGGLLLLALITAVLYKVGFFKRQYKEMMEEANGQIAPENGTQTPSPPSEK

SEQ ID NO: 297 - DNA, 739 bp, Human
taaagcaaaccccagcccacaccctggcaggcagccagggatgggtggatcaggaaggctcctggttgggcttttgcatcaggctcaggctgggcataaaggaggctcctgtgggctagagggaggcagacatggggaccatgaagacccaaagggatggccactccctggggcggtggtcactggtgctcctgctgctgggcctggtgatgcctctggccatcattgcccaggtcctcagctacaaggaagctgtgcttcgtgctatagatggcatcaaccagcggtcctcggatgctaacctctaccgcctcctggacctggaccccaggcccacgatggatggggacccagacacgccaaagcctgtgagcttcacagtgaaggagacagtgtgccccaggacgacacagcagtcaccagaggattgtgacttcaagaaggacgggctggtgaagcggtgtatggggacagtgaccctcaaccaggccaggggctcctttgacatcagttgtgataaggataacaagagatttgccctgctgggtgatttcttccggaaatctaaagagaagattggcaaagagtttaaaagaattgtccagagaatcaaggattttttgcggaatcttgtacccaggacagagtcctagtgtgtgccctaccctggctcaggcttctgggctctgagaaataaactatgagagcaatttcaaaaaaaaaaaaaaaaaaaaaaaaa

SEQ ID NO: 298 - DNA, 2072 bp, Human
gggcagtcgtaggagactctgaaaaagcaaataaatcaatgttaaatcagaaatgtgaatgtagtaaggggctgaagagacaggggaagagaatacatgggaaaatattgaaaaggacagagtgatcaaaaaaagcagggacatgggagcattgggcagcacactgggagccatttactttatgctcttattgtatgattgagaaaaaaaatgtccttagtggttaagtggcttttcaatgccacatcagacttgttccatagcagttgaattaggggaaggtgaataagttggaggttggtgacaaggagagaagctggaacagagaggagagtcagaaccagagggaaatgagagactgagtaggcatctcagggtttttgaaggagtggattttctttgttgcagtcaggggaggtttgtctgttggctgcagaaagaagtcagaatagagatatcgtggggtaggtttgtttggaacagaaatcaaagaccaatttttctgagagaaggaaataacatctgcaaatgatatgctgtttttgctacttccattgttagctgttctcccaggtgatggcaatgcagacgggctcaaggagcctctctccttccatgtcatctggatcgcatccttttacaaccattcctggaaacaaaatctggtctcaggttggctgagtgatttgcagactcatacctgggacagcaattccagcaccatcgttttcctgtggccctggtccaggggaaacttcagcaatgaggagtggaaggaactggaaacattattccgtatacgcaccattcggtcatttgagggaattcgtagatacgcccatgaattgcagtttgaatatccttttgagatacaggtgacaggaggctgtgagctgcactctggaaaggtctcaggaagcttcttgcagttagcttatcaaggatcagactttgtgagcttccagaacaattcatggttgccatatccagtggctgggaatatggccaagcatttctgcaaagtgctcaatcagaatcagcatgaaaatgacataacacacaatcttctcagtgacacctgcccacgtttcatcttgggtcttcttgatgcaggaaaggcacatctccagcggcaagtgaagcccgaggcctggctgtcccatggccccagtcctggccctggccatctgcagcttgtgtgccatgtctcaggattctacccaaagcccgtgtgggtgatgtggatgcggggtgagcaggagcagcagggcactcagcgaggggacatcttgcccagtgctgatgggacatggtatctccgcgcaaccctggaggtggccgctggggaggcagctgacctgtcctgtcgggtgaagcacagcagtctagagggccaggacatcgtcctctactgggagcatcacagttccgtgggcttcatcatcttggcggtgatagtgcctttacttcttctgataggtcttgcgctttggttcaggaaacgctgtttctgttaagacacaccatgagcctcctcgtcacccttctccttttggggtgagagaccagcagcccaagggctccagacacacctgaacacatcgtgatgatgacgtcctctcaactctctttgtaaaaattttgttatttttgcttgtttctgattaatgattgtttgtcaatataagctcaatttaattttgcaggatttgttgttctgacctgggttctgggacttttaaattcaaattttatctccagatggaatggggtcctagcaacctccacatgttcacctattaatggatcatcaggcctgttttagatatcccttactccagagggccttccctgacttacaagtgggaagcagtctcttcctggtctgaactcccgccacattttagccgtactttgctaactgtgctcctcacttcctcttcttcattgcagttatttagatcccccctttccttctaatttttcagctccttcaatgcaaagtacatgtatttttaatatatgcatccctggtgaaggatcttgcctgcatgaaacatgttctcaataaa

SEQ ID NO: 299 - protein, 327 aa, Human
MLFLLLPLLAVLPGDGNADGLKEPLSFHVIWIASFYNHSWKQNLVSGWLSDLQTHTWDSNSSTIVFLWPWSRGNFSNEEWKELETLFRIRTIRSFEGIRRYAHELQFEYPFEIQVTGGCELHSGKVSGSFLQLAYQGSDFVSFQNNSWLPYPVAGNMAKHFCKVLNQNQHENDITHNLLSDTCPRFILGLLDAGKAHLQRQVKPEAWLSHGPSPGPGHLQLVCHVSGFYPKPVWVMWMRGEQEQQGTQRGDILPSADGTWYLRATLEVAAGEAADLSCRVKHSSLEGQDIVLYWEHHSSVGFIILAVIVPLLLLIGLALWFRKRCFC

SEQ ID NO: 300 - DNA, 2007 bp, Human
tctgggcacgggtgcaggctgaggagctgcccagagcaccgctcacactcccagagtacctgaagtcggcatttcaatgacaggtgacaagggtccccaaaggctaagcgggtccagctatggttccatctccagcccgaccagcccgaccagcccagggccacagcaagcacctcccagagagacctacctgagtgagaagatccccatcccagacacaaaaccgggcaccttcagcctgcggaagctatgggccttcacggggcctggcttcctcatgagcattgctttcctggacccaggaaacatcgagtcagatcttcaggctggcgccgtggcgggattcaaacttctctgggtgctgctctgggccaccgtgttgggcttgctctgccagcgactggctgcacgtctgggcgtggtgacaggcaaggacttgggcgaggtctgccatctctactaccctaaggtgccccgcaccgtcctctggctgaccatcgagctagccattgtgggctccgacatgcaggaagtcatcggcacggccattgcattcaatctgctctcagctggacgaatcccactctggggtggcgtcctcatcaccatcgtggacaccttcttcttcctcttcctcgataactacgggctgcggaagctggaagctttttttggactccttataaccattatggccttgacctttggctatgagtatgtggtggcgcgtcctgagcagggagcgcttcttcggggcctgttcctgccctcgtgcccgggctgcggccaccccgagctgctgcaggcggtgggcattgttggcgccatcatcatgccccacaacatctacctgcactcggccctggtcaagtctcgagagatagaccgggcccgccgagcggacatcagagaagccaacatgtacttcctgattgaggccaccatcgccctgtccgtctcctttatcatcaacctctttgtcatggctgtctttgggcaggccttctaccagaaaaccaaccaggctgcgttcaacatctgtgccaacagcagcctccacgactacgccaagatcttccccatgaacaacgccaccgtggccgtggacatttaccaggggggcgtgatcctgggctgcctgttcggccccgcggccctctacatctgggccataggtctcctggcggctgggcagagctccaccatgacgggcacctacgcgggacagttcgtgatggagggcttcctgaggctgcggtggtcacgcttcgcccgtgtcctcctcacccgctcctgcgccatcctgcccaccgtgctcgtggctgtcttccgggacctgagggacttgtcgggcctcaatgatctgctcaacgtgctgcagagcctgctgctcccgttcgccgtgctgcccatcctcacgttcaccagcatgcccaccctcatgcaggagtttgccaatggcctgctgaacaaggtcgtcacctcttccatcatggtgctagtctgcgccatcaacctctacttcgtggtcagctatctgcccagcctgccccaccctgcctacttcggccttgcagccttgctggccgcagcctacctgggcctcagcacctacctggtctggacctgttgccttgcccacggagccacctttctggcccacagctcccaccaccacttcctgtatgggctccttgaagaggaccagaaaggggagacctctggctaggcccacaccagggcctggctgggagtggcatgtatgacgtgactggcctgctggatgtggagggggcgcgtgcaggcagcaggatagagtgggacagttcctgagaccagccaacctgggggctttagggacctgctgtttcctagcgcagccatgtgattaccctctgggtctcagtgtcctcatctgtaaaatggagacaccaccacccttgccatggaggttaagcactttaacacagtgtctggcacttgggacaaaaacaaacaaacgaaaaa

SEQ ID NO: 301 - DNA, 2445 bp, Human
cgcagctcaacctgagctacacagccagatgcgagatgcttctctgctgatctgagtctgcctgcagcatggaccttggtcttccctgaagcatctccagggctggagggacgactgccatgcacctagggcttatccatccgcagagcagggcagtgggaggagacgctatgacccccatcctcacggtcctgatctgtctcgggctgagtctgggcccccggacccacgtgcaggcagggaccctccccaagcccacactctgggctgagccaggctctgtgatcacccaggggagtcccgtgaccctctggtgtcaggggatcctggagacccaggagtaccgtctgtatagagaaaagaaaacagcaccctggattacacggatcccacaggagattgtgaagaagggccagttccccatcccgtccatcacctgggaacacaccgggcggtatcgctgtttctacggtagccacactgcaggctggtcagagcccagtgaccccctggagctggtggtgacaggagcctacatcaaacccaccctctcggctctacccagccctgtggtgacctcaggagggaacgtgaccctccattgtgtctcacaggtggcatttggcagcttcattctgtgtaaggaaggagaagatgaacacccacaatgcctgaactcacagccccgtacccatgggtggtcccgggccatcttctctgtgggccccgtgagcccgagtcgcaggtggtcgtacaggtgctatgcttatgactcgaactctccccatgtgtggtctctacccagtgatctcctggagctcctggtcccaggagcagctgagaccctcagcccaccacaaaacaagtccgattccaaggctggagcagctaacaccctcagcccatcacaaaacaagactgcctcacacccccaggattacacagtggagaatctcatccgcatgggcatagctggcttggtcctggtggtcctcgggattctgctatttgaggctcagcacagccagagaagcctctgagatgcagccgggaggtgaacagcagagagaagaatgtacccttcagagtggtggagccttgggaacagatctgatgatgccaggaggttccgggagacaatttagggctgatgctatctggactgtctgccaatcatttttagagggaggaatcagtgttggattgcagagacattttctggagtgatccatgaaggaccattaacatgtgatacctttcctctctattaatgttgacttcccttggttggatcctcttctttccccacccccagacagacatgaggctacatcccacatggcagcgttgggtccacacctctgcacatctgtgtgctctggtccatggtgtgtaacacagtcttctttattactcattgccatactccctggtgtgctttactgagcctccatctcttcaattcagagttccaaacgtgcttcagtaactaaatcaatgggagagtatcggatttcaaccaggaaaagataaatccaccctgatgccctgacaccctctctgaaccctacgagcccttccctccttctcacatgctacctgtgcagcttctccttagatcattgtgtaaccatcactgccatcctgttccacacatggtcatcaccctacacccattcagcagccactccccattccctcttccctccagcacctgctaaccacaaatgtgctttctgtctctacggatttgcctattctgtctgaaaacatttcaatctcctttgacctgtgagctcctcacttcgagacttcctgcctttccaggcagaaccaaagtacaccacgtcaaaagcaatgataggcatttgcagtgtgttggtgatccacgaaaggaaaatcacggaagcaggatagaaatccagctgcagacaagacctcaggtcgatgaatcttgacaagcagttgagctgtttttttctactcacctaggacagtcaggcagaagtatgcaaaatgactggggctgattcttttctgaattgtcgcaaacagcaagaggacttgagtcctagcattaaagagttcaacatgtctaggtccaagaccactgttgtgtttgaaggatgtaaaaccctgctgcataggatggaatatttggagggaggatcctgaaaaacatgagggatcaaatagtcctcaactttctaggacaaagggagcagctatttgccatctaccctccagaataaagaaatcttatcattcaccatctaccctctagaataaagaaatcttatcattcgccatctaccctgtagaataaagaaatcttatcattcaccgtctaccctctagagtaaacaaatcttatcattcaccatctaccctctagaataaagaaatcttatcattcgccatctaccctctagaataaagaaatct

SEQ ID NO: 302 - protein, 289 aa, Human [sequence omitted]

SEQ ID NO: 303 - DNA, 2368 bp, Human
ggcacgagggtgagccacggcgcccggcatccaggctagtcttgaactcctgacctcaagtgatccgtccgcctgggcctcccaaggtgctgggattacaggcgtgagccaccgcgcccggccaggttgtgggttttaatgggaccatctcactgcctaccgtttcctttttccgtccgaacagaaggggcctgagcagtgaactgacagtggcaacgccgggtgaggcgggatggaggagtttacgagcctgggtgacgccctgttccgcgtcctggccccgcccctcccggcagagccccttggcgcgtgacacaggccccgcccttgctgtacgccatcagccggcgccgcgccgccgggtgttactttgccccgccggcggggcggtcagcctcctgtcaccgcctgttccggctatggtcccgtccggtgttctgtaagttggcaacctaggctcctgacgcgaccctggtcctgatggcggcggcgacggccgcggcagccctggcggcggccgatccccctcccgcaatgccgcaggcggcaggggccggagggcccacaacccgcagagacttctactggctgcgctcctttctggccggaggtgggtccatgccacgaagagccagccgcgctctgagtggcgggggcaggactgtgggcaagtgggatgcaagcggcctctatgacattcctggactctggctgcttcaatgttctgttagatgtctgccctgacctgctgtaacctctttctagtaatcacttgactaatgacagctaggttatggggagtgggacctttggcactccggcagaggctggggaggtggaaggtctgaatcaggcacccattcttcagggctggataacagggaaaagaggaggatcccttacagagaccctggggttttagtgtagacttggattttgctgtttgcttaaaggaaaacaaatattggagatcagctttttaatgactactggaaaattgtgcaaactgtctacagccaaaactggttccagtgattctagtaaactgtgacacagtacttgacaagccctattattgatgtgactttgggatcaaaaagttcatattgtctcttaggaatttcctgggccttcaagctccacccttccttaattacttctctgggttgtgtaggggtgggttgcccctccacacctgtgggtgtttctcgtaaggtggaacgagagacttaggaaagaaaaagacacagagacaaagtatagagacagaaataaggggacccggggaaccagcgttcagcatatggaggatcccgccagcctctgagttcccttagtatttattgatcatttgtgggtgtttctcgaagagggggatgtgtcagggtcacaagacaattgtggggagagggtcagcagacaaacacgtgaacaaaggtctttgcgtcatagacaatgtaaaggattaagtgctgtgctcttagatatgcatacacataaacatctcaatgctttacaaagcagtattgctgcccgcaggtcccacctccagccctaaggcggtttttccctatctcagtagatggagcatacaatcgcgttttataccgagacattccattgcccagggacaggcaggagacagatgccttcctcttgtctcaactgcaagaggcatgccttcctcttatactaatcctcctcagcacagaccctttacgggtgtcgggctgggggacgttcaggtctttcccttcccacgaggccgtatttcagactatcacatggggagaaaccttggacaatacctggctttcctaggcagaggtccctgcggccttccgcagtttttgtgtccctgggtacttgagattagggagtggtgatgactcttaaggagcatgctgccttcaagcatctgtttaacaaagcacatcttgcaccgcccttaatccattcaactctgtgacacagcacatgtttcagagagcacggggttgggggtaaggttatagattaacagaatctcaaggcagaagaatttttcttagtacagaacaaaatggagtctcctatgtctacttctttctacacagacacagtaacaatctgatctctcttgcttttccccacaggttgtcattacttaattatttaagattcaaaaatttaaaaattccacattgaagttgtgtgcagtggctcactactgtagtcccagttactagggaagctgaggcaggaagactgcttgagtccaggagatcgaggctccagtgagccatgatcacaccactaccctccagcctgagctacagagagagaccctctcctaaaagaagaaaaaaacaaaaaaaaaaaaaaaaaa

SEQ ID NO: 304 - DNA, 2631 bp, Human
ggcacgaggaacaacctatttgcaaagttggcgcaaacattcctgcctgacaggaccatggacacaggttgtagagatagagatggctctggctgtgcattcagcagattctgtagatagaattaataggacttggatgggattgtggtgagagaaagtgaaatgaaagataagttctagtttggaagttttaacaactgaatgtttaaactcaaatagacacaaaatattggaagagtggcaggtttgggaggatgagacaatcaactgtttggttgagccacgttaggtttgaaatgtctacgggatcccgtggggagaggttatatcagactggagcaccagagagaggccaaggctgatagtttagatgaaaagagagcatgatattttaagccctgagactggataatatcacctatagaaagactatatagagataagagaggtggggaacaagtaaaagctgcgggacactcctaaatttagagtcaaatttagagcagaaaatactagcaaaggggactgaaaagcggtggccaattgagcttcaaatgcaagtgaaagtgtgttgtgtgtacatttatcatctcatggcacaggaaaaacgtgatttaaggagaaggaagcgatccaatgggaagaagagatccaatggatcctctatcacgaagatattgagataagaaccaatatggatttgcacccactgcatttgcagccttgaggtcataagcatcctcaggaaaatgcaccaggtgctgctggcaagatggaaaccaacttctccactcctctgaatgaatatgaagaagtgtcctatgagtctgctggctacactgttctgcggatcctcccattggtggtgcttggggtcacctttgtcctcggggtcctgggcaatgggcttgtgatctgggtggctggattccggatgacacgcacagtcaccaccatctgttacctgaacctggccctggctgacttttctttcacggccacattaccattcctcattgtctccatggccatgggagaaaaatggccttttggctggttcctgtgtaagttaattcacatcgtggtggacatcaacctctttggaagtgtcttcttgattggtttcattgcactggaccgctgcatttgtgtcctgcatccagtctgggcccagaaccaccgcactgtgagtctggccatgaaggtgatcgtcggaccttggattcttgctctagtccttaccttgccagttttcctctttttgactacagtaactattccaaatggggacacatactgtactttcaactttgcatcctggggtggcacccctgaggagaggctgaaggtggccattaccatgctgacagccagagggattatccggtttgtcattggctttagcttgccgatgtccattgttgccatctgctatgggctcattgcagccaagatccacaaaaagggcatgattaaatccagccgtcccttacgggtcctcactgctgtggtggcttctttcttcatctgttggtttccctttcaactggttgcccttctgggcaccgtctggctcaaagagatgttgttctatggcaagtacaaaatcattgacatcctggttaacccaacgagctccctggccttcttcaacagctgcctcaaccccatgctttacgtctttgtgggccaagacttccgagagagactgatccactccctgcccaccagtctggagagggccctgtctgaggactcagccccaactaatgacacggctgccaattctgcttcacctcctgcagagactgagttacaggcaatgtgaggatggggtcagggatattttgagttctgttcatcctaccctaatgccagttccagcttcatctacccttgagtcatattgaggcattcaaggatgcacagctcaagtatttattcaggaaaaatgcttttgtgtccctgatttggggctaagaaatagacagtcaggctactaaaatattagtgttattttttgttttttgacttctgcctataccctggggtaagtggagttgggaaatacaagaagagaaagaccagtggggatttgtaagacttagatgagatagcgcataataaggggaagactttaaagtataaagtaaaatgtttgctgtaggttttttatagctattaaaaaaaatcagattatggaagttttcttctatttttagtttgctaagagttttctgtttctttttcttacatcatgagtggactttgcattttatcaaatgcattttctacatgtattaagatggtcatattattcttcttcttttatgtaaatcattataaataatgttcattaagttctgaatgttaaactactcttgaattcctggaataaaccacacttagtcctgatgtactttaaatatttatatctcacaggagttggttagaatttctgtgtttatgtttatatactgttatttcactttttctactatccttgctaagttttcatagaaaataaggaacaaagagaaacttgtaatggtctctgaaaaggaattgagaagtaattcctctgattctgttttctggtgttatatctttattaaatattcagaaaaattc

SEQ ID NO: 305 - protein, 351 aa, Human
METNFSTPLNEYEEVSYESAGYTVLRILPLVVLGVTFVLGVLGNGLVIWVAGFRMTRTVTTICYLNLALADFSFTATLPFLIVSMAMGEKWPFGWFLCKLIHIVVDINLFGSVFLIGFIALDRCICVLHPVWAQNHRTVSLAMKVIVGPWILALVLTLPVFLFLTTVTIPNGDTYCTFNFASWGGTPEERLKVAITMLTARGIIRFVIGFSLPMSIVAICYGLIAAKIHKKGMIKSSRPLRVLTAVVASFFICWFPFQLVALLGTVWLKEMLFYGKYKIIDILVNPTSSLAFFNSCLNPMLYVFVGQDFRERLIHSLPTSLERALSEDSAPTNDTAANSASPPAETELQAM

SEQ ID NO: 306 - DNA, 2170 bp, Human
ctgagggctcatccctctgcagagcgcggggtcaccgggaggagacgccatgacgcccgccctcacagccctgctctgccttgggctgagtctgggccccaggacccgcgtgcaggcagggcccttccccaaacccaccctctgggctgagccaggctctgtgatcagctgggggagccccgtgaccatctggtgtcaggggagcctggaggcccaggagtaccgactggataaagagggaagcccagagcccttggacagaaataacccactggaacccaagaacaaggccagattctccatcccatccatgacagagcaccatgcggggagataccgctgccactattacagctctgcaggctggtcagagcccagcgaccccctggagctggtgatgacaggattctacaacaaacccaccctctcagccctgcccagccctgtggtggcctcaggggggaatatgaccctccgatgtggctcacagaagggatatcaccattttgttctgatgaaggaaggagaacaccagctcccccggaccctggactcacagcagctccacagtggggggttccaggccctgttccctgtgggccccgtgaaccccagccacaggtggaggttcacatgctattactattatatgaacaccccccaggtgtggtcccaccccagtgaccccctggagattctgccctcaggcgtgtctaggaagccctccctcctgaccctgcagggccctgtcctggcccctgggcagagcctgaccctccagtgtggctctgatgtcggctacgacagatttgttctgtataaggagggggaacgtgacttcctccagcgccctggccagcagccccaggctgggctctcccaggccaacttcaccctgggccctgtgagcccctcccacgggggccagtacaggtgctatggtgcacacaacctctcctccgagtggtcggcccccagcgaccccctgaacatcctgatggcaggacagatctatgacaccgtctccctgtcagcacagccgggccccacagtggcctcaggagagaacgtgaccctgctgtgtcagtcatggtggcagtttgacactttccttctgaccaaagaaggggcagcccatcccccactgcgtctgagatcaatgtacggagctcataagtaccaggctgaattccccatgagtcctgtgacctcagcccacgcggggacctacaggtgctacggctcatacagctccaacccccacctgctgtctttccccagtgagcccctggaactcatggtctcaggacactctggaggctccagcctcccacccacagggccgccctccacacctggtctgggaagatacctggaggttttgattggggtctcggtggccttcgtcctgctgctcttcctcctcctcttcctcctcctccgacgtcagcgtcacagcaaacacaggacatctgaccagagaaagactgatttccagcgtcctgcaggggctgcggagacagagcccaaggacaggggcctgctgaggaggtccagcccagctgctgacgtccaggaagaaaacctctatgctgccgtgaaggacacacagtctgaggacagggtggagctggacagtcagagcccacacgatgaagacccccaggcagtgacgtatgccccggtgaaacactccagtcctaggagagaaatggcctctcctccctcctcactgtctggggaattcctggacacaaaggacagacaggtggaagaggacaggcagatggacactgaggctgctgcatctgaagcctcccaggatgtgacctacgcccagctgcacagcttgacccttagacggaaggcaactgagcctcctccatcccaggaaggggaacctccagctgagcccagcatctacgccactctggccatccactagcccggggggtacgcagaccccacactcagcagaaggagactcaggactgctgaaggcacgggagctgcccccagtggacaccagtgaaccccagtcagcctggacccctaacacagaccatgaggagacgctgggaacttgtgggactcacctgactcaaagatgactaatatcgtcccattttggaaataaagcaacagacttctcaacaatcaatgagttaat

SEQ ID NO: 307 - protein, 631 aa, Human
MTPALTALLCLGLSLGPRTRVQAGPFPKPTLWAEPGSVISWGSPVTIWCQGSLEAQEYRLDKEGSPEPLDRNNPLEPKNKARFSIPSMTEHHAGRYRCHYYSSAGWSEPSDPLELVMTGFYNKPTLSALPSPVVASGGNMTLRCGSQKGYHHFVLMKEGEHQLPRTLDSQQLHSGGFQALFPVGPVNPSHRWRFTCYYYYMNTPQVWSHPSDPLEILPSGVSRKPSLLTLQGPVLAPGQSLTLQCGSDVGYDRFVLYKEGERDFLQRPGQQPQAGLSQANFTLGPVSPSHGGQYRCYGAHNLSSEWSAPSDPLNILMAGQIYDTVSLSAQPGPTVASGENVTLLCQSWWQFDTFLLTKEGAAHPPLRLRSMYGAHKYQAEFPMSPVTSAHAGTYRCYGSYSSNPHLLSFPSEPLELMVSGHSGGSSLPPTGPPSTPGLGRYLEVLIGVSVAFVLLLFLLLFLLLRRQRHSKHRTSDQRKTDFQRPAGAAETEPKDRGLLRRSSPAADVQEENLYAAVKDTQSEDRVELDSQSPHDEDPQAVTYAPVKHSSPRREMASPPSSLSGEFLDTKDRQVEEDRQMDTEAAASEASQDVTYAQLHSLTLRRKATEPPPSQEGEPPAEPSIYATLAIH

SEQ ID NO: 308 - DNA, 2957 bp, Human
gaattcccaaacgtgcacaggggagtgagggcagggcgctcgcagggggcacgcagggagggcccagggcgccagggaggccgcgccgggctaatccgaaggggctgcgaggtcaggctgtaaccgggtcaatgtgtggaatattggggggctcggctgcagacttggccaaatggacgggactattaaggaggctctgtcggtggtgagcgacgaccagtccctctttgactcagcgtacggagcggcagcccatctccccaaggccgacatgactgcctcggggagtcctgactacgggcagccccacaagatcaaccccctcccaccacagcaggagtggatcaatcagccagtgagggtcaacgtcaagcgggagtatgaccacatgaatggatccagggagtctccggtggactgcagcgttagcaaatgcagcaagctggtgggcggaggcgagtccaaccccatgaactacaacagctatatggacgagaagaatggcccccctcctcccaacatgaccaccaacgagaggagagtcatcgtccccgcagaccccacactgtggacacaggagcatgtgaggcaatggctggagtgggccataaaggagtacagcttgatggagatcgacacatcctttttccagaacatggatggcaaggaactgtgtaaaatgaacaaggaggacttcctccgcgccaccaccctctacaacacggaagtgctgttgtcacacctcagttacctcagggaaagttcactgctggcctataatacaacctcccacaccgaccaatcctcacgattgagtgtcaaagaagacccttcttatgactcagtcagaagaggagcttggggcaataacatgaattctggcctcaacaaaagtcctccccttggaggggcacaaacgatcagtaagaatacagagcaacggccccagccagatccgtatcagatcctgggcccgaccagcagtcgcctagccaaccctggaagcgggcagatccagctgtggcaattcctcctggagctgctctccgacagcgccaacgccagctgtatcacctgggaggggaccaacggggagttcaaaatgacggaccccgatgaggtggccaggcgctggggcgagcggaaaagcaagcccaacatgaattacgacaagctgagccgggccctccgttattactatgataaaaacattatgaccaaagtgcacggcaaaagatatgcttacaaatttgacttccacggcattgcccaggctctgcagccacatccgaccgagtcgtccatgtacaagtacccttctgacatctcctacatgccttcctaccatgcccaccagcagaaggtgaactttgtccctccccatccatcctccatgcctgtcacttcctccagcttctttggagccgcatcacaatactggacctcccccacggggggaatctaccccaaccccaacgtcccccgccatcctaacacccacgtgccttcacacttaggcagctactactagaagcttcttctagctgaagcccatcctgcacacttactggatgctttggactcaacaggacatatgtggccttgaagggaagacaaaactggatgttctttcttgttggatagaacctttgtatttgttctttaaaaacattttttttaatgttggtaacttttgcttcctctacctgaacaaagagatgaataattccatgggccagtatgccagtttgaattctcagtctcctagcatcttgtgagttgcatattaagattactggaatggttaagtcatggttctgagaaagaagctgtacgttttctttatgtttttatgaccaaagcagtttcttgtcaatacacggggttcagtatgacacagaatcatggacttaacccgtcatgttctggtttgagatttagtgacaaatagaggtgggaagcttataatctaattttaggaggaccaaattcagcggatggcaactggaacattgattgtaaggccagtgaagttttcacccaactggaatttgatggaaagaaggtttgtgtgtttaagacgccaagggcattgcagaatccctctcagtggacagtatgcactcagctgaccactctctctagaaatagtcaagatatgaactaagaaattttaatgcaaatacatacattcctgaaagacggggaattaaattactaattttttttttttaaatgatgacagtggtcccagaacttggaaaagttgtagggatttctaaactcaagcagattcgcaagtgctgtgcgcttgtcagaccatcagaccagggccaaccaatcagaaggcaacttactgtataaattatgcagagttattttcctatatctcacagtattaaaaaataaataattaaaaattaagaataaataaacgagttgacctcggtcacaaaagcagttttactatcgaatcaatcgctgttatttttttttaatgtaatttgtacatcttttttcaatctgtacatttgggctgtcttgtatgtttttatgctcctttttaaaaagcataatatgcctatagctgaaaaggaaacagggctgtttaagtcactgacttatgagaaagcaaagcactggtacagttatttaacaggcatacacaagcagggaaaagataatccatttagatctttaatgctttggaaatgcgtgtaacagtactgcaataatcacagctctgggaaaaacaacgaaactttcccttgtggagaggagggattttcctgctctatataagcaacatatttttagacattaaaatatatataattttgcaggtaattgttgacttttttaactatattaagtgttaagctgacaactgtcaaagaagaccatgttgtaaaataatttgactaaataaatggttccttctctcaaaaaaaaaaaaa

SEQ ID NO: 309 - protein, 452 aa, Human
MDGTIKEALSVVSDDQSLFDSAYGAAAHLPKADMTASGSPDYGQPHKINPLPPQQEWINQPVRVNVKREYDHMNGSRESPVDCSVSKCSKLVGGGESNPMNYNSYMDEKNGPPPPNMTTNERRVIVPADPTLWTQEHVRQWLEWAIKEYSLMEIDTSFFQNMDGKELCKMNKEDFLRATTLYNTEVLLSHLSYLRESSLLAYNTTSHTDQSSRLSVKEDPSYDSVRRGAWGNNMNSGLNKSPPLGGAQTISKNTEQRPQPDPYQILGPTSSRLANPGSGQIQLWQFLLELLSDSANASCITWEGTNGEFKMTDPDEVARRWGERKSKPNMNYDKLSRALRYYYDKNIMTKVHGKRYAYKFDFHGIAQALQPHPTESSMYKYPSDISYMPSYHAHQQKVNFVPPHPSSMPVTSSSFFGAASQYWTSPTGGIYPNPNVPRHPNTHVPSHLGSYY

SEQ ID NO: 310 - DNA, 7179 bp, Human
ggagctgtacgtaccgccgtccgcgcctccaaggtttcacggcttcctcagcagagactcgggctcgtccgccatgtccgccgcagacgaggttgacgggctgggcgtggcccggccgcactatggctctgtcctggataatgaaagacttactgcagaggagatggatgaaaggagacgtcagaacgtggcttatgagtacctttgtcatttggaagaagcgaagaggtggatggaagcatgcctaggggaagatctgcctcccaccacagaactggaggaggggcttaggaatggggtctaccttgccaaactggggaacttcttctctcccaaagtagtgtccctgaaaaaaatctatgatcgagaacagaccagatacaaggcgactggcctccactttagacacactgataatgtgattcagtggttgaatgccatggatgagattggattgcctaagattttttacccagaaactacagatatctatgatcgaaagaacatgccaagatgtatctactgtatccatgcactcagtttgtacctgttcaagctaggcctggcccctcagattcaagacctatatggaaaggttgacttcacagaagaagaaatcaacaacatgaagactgagttggagaagtatggcatccagatgcctgcctttagcaagattgggggcatcttggctaatgaactgtcagtggatgaagccgcattacatgctgctgttattgctattaatgaagctattgaccgtagaattccagccgacacatttgcagctttgaaaaatccgaatgccatgcttgtaaatcttgaagagcccttggcatccacttaccaggatatactttaccaggctaagcaggacaaaatgacaaatgctaaaaacaggacagaaaactcagagagagaaagagatgtttatgaggagctgctcacgcaagctgaaattcaaggcaatataaacaaagtcaatacattttctgcattagcaaatatcgacctggctttagaacaaggagatgcactggccttgttcagggctctgcagtcaccagccctggggcttcgaggactgcagcaacagaatagcgactggtacttgaagcagctcctgagtgataaacagcagaagagacagagtggtcagactgaccccctgcagaaggaggagctgcagtctggagtggatgctgcaaacagtgctgcccagcaatatcagagaagattggcagcagtagcactgattaatgctgcaatccagaagggtgttgctgagaagactgttttggaactgatgaatcccgaagcccagctgccccaggtgtatccatttgccgccgatctctatcagaaggagctggctaccctgcagcgacaaagtcctgaacataatctcacccacccagagctctctgtcgcagtggagatgttgtcatcggtggccctgatcaacagggcattggaatcaggagatgtgaatacagtgtggaagcaattgagcagttcagttactggtcttaccaatattgaggaagaaaactgtcagaggtatctcgatgagttgatgaaactgaaggctcaggcacatgcagagaataatgaattcattacatggaatgatatccaagcttgcgtggaccatgtgaacctggtggtgcaagaggaacatgagaggattttagccattggtttaattaatgaagccctggatgaaggtgatgcccaaaagactctgcaggccctacagattcctgcagctaaacttgagggagtccttgcagaagtggcccagcattaccaagacacgctgattagagcgaagagagagaaagcccaggaaatccaggatgagtcagctgtgttatggttggatgaaattcaaggtggaatctggcagtccaacaaagacacccaagaagcacagaagtttgccttaggaatctttgccattaatgaggcagtagaaagtggtgatgttggcaaaacactgagtgcccttcgctcccctgatgttggcttgtatggagtcatccctgagtgtggtgaaacttaccacagtgatcttgctgaagccaagaagaaaaaactggcagtaggagataataacagcaagtgggtgaagcactgggtaaaaggtggatattattattaccacaatctggagacccaggaaggaggatgggatgaacctccaaattttgtgcaaaattctatgcagctttctcgggaggagatccagagttctatctctggggtgactgccgcatataaccgagaacagctgtggctggccaatgaaggcctgatcaccaggctgcaggctcgctgccgtggatacttagttcgacaggaattccgatccaggatgaatttcctgaagaaacaaatccctgccatcacctgcattcagtcacagtggagaggatacaagcagaagaaggcatatcaagatcggttagcttacctgcgctcccacaaagatgaagttgtaaagattcagtccctggcaaggatgcaccaagctcgaaagcgctatcgagatcgcctgcagtacttccgggaccatataaatgacattatcaaaatccaggcttttattcgggcaaacaaagctcgggatgactacaagactctcatcaatgctgaggatcctcctatggttgtggtccgaaaatttgtccacctgctggaccaaagtgaccaggattttcaggaggagcttgaccttatgaagatgcgggaagaggttatcaccctcattcgttctaaccagcagctggagaatgacctcaatctcatggatatcaaaattggactgctagtgaaaaataagattacgttgcaggatgtggtttcccacagtaaaaaacttaccaaaaaaaataaggaacagttgtctgatatgatgatgataaataaacagaagggaggtctcaaggctttgagcaaggagaagagagagaagttggaagcttaccagcacctgttttatttattgcaaaccaatcccacctatctggccaagctcatttttcagatgccccagaacaagtccaccaagttcatggactctgtaatcttcacactctacaactacgcgtccaaccagcgagaggagtacctgctcctgcggctctttaagacagcactccaagaggaaatcaagtcgaaggtagatcagattcaagagattgtgacaggaaatcctacggttattaaaatggttgtaagtttcaaccgtggtgcccgtggccagaatgccctgagacagatcttggccccagtcgtgaaggaaattatggatgacaaatctctcaacatcaaaactgaccctgtggatatttacaaatcttgggttaatcagatggagtctcagacaggagaggcaagcaaactgccctatgatgtgacccctgagcaggcgctagctcatgaagaagtgaagacacggctagacagctccatcaggaacatgcgggctgtgacagacaagtttctctcagccattgtcagctctgtggacaaaatcccttatgggatgcgcttcattgccaaagtgctgaaggactcgttgcatgagaagttccctgatgctggtgaggatgagctgctgaagattattggtaacttgctttattatcgatacatgaatccagccattgttgctcctgatgcctttgacatcattgacctgtcagcaggaggccagcttaccacagaccaacgccgaaatctgggctccattgcaaaaatgcttcagcatgctgcttccaataagatgtttctgggagataatgcccacttaagcatcattaatgaatatctttcccagtcctaccagaaattcagacggtttttccaaactgcttgtgatgtcccagagcttcaggataaatttaatgtggatgagtactctgatttagtaaccctcaccaaaccagtaatctacatttccattggtgaaatcatcaacacccacactctcctgttggatcaccaggatgccattgctccggagcacaatgatccaatccacgaactgctggacgacctcggcgaggtgcccaccatcgagtccctgataggggaaagctctggcaatttaaatgacccaaataaggaggcactggctaagacggaagtgtctctcaccctgaccaacaagttcgacgtgcctggagatgagaatgcagaaatggatgctcgaaccatcttactgaatacaaaacgtttaattgtggatgtcatccggttccagccaggagagaccttgactgaaatcctagaaacaccagccaccagtgaacaggaagcagaacatcagagagccatgcagagacgtgctatccgtgatgccaaaacacctgacaagatgaaaaagtcaaaatctgtaaaggaagacagcaacctcactcttcaagagaagaaagagaagatccagacaggtttaaagaagctaacagagcttggaaccgtggacccaaagaacaaataccaggaactgatcaacgacattgccagggatattcggaatcagcggaggtaccgacagaggagaaaggccgaactagtgaaactgcaacagacatacgctgctctgaactctaaggccaccttttatggggagcaggtggattactataaaagctatatcaaaacctgcttggataacttagccagcaagggcaaagtctccaaaaagcctagggaaatgaaaggaaagaaaagcaaaaagatttctctgaaatatacagcagcaagactacatgaaaaaggagttcttctggaaattgaggacctgcaagtgaatcagtttaaaaatgttatatttgaaatcagtccaacagaagaagttggagacttcgaagtgaaagccaaattcatgggagttcaaatggagacttttatgttacattatcaggacctgctgcagctacagtatgaaggagttgcagtcatgaaattatttgatagagctaaagtaaatgtcaacctcctgatcttccttctcaacaaaaagttctacgggaagtaattgatcgtttgctgccagcccagaaggatgaaggaaagaagcacctcacagctcctttctaggtccttctttcctcattggaagcaaagacctagccaacaacagcacctcaatctgatacactcccgatgccacatttttaactcctctcgctctgatgggacatttgttacccttttttcatagtgaaattgtgtttcaggcttagtctgacctttctggtttcttcattttcttccattacttaggaaagagtggaaactccactaaaatttctctgtgttgttacagtcttagaggttgcagtactatattgtaagctttggtgtttgtttaattagcaatagggatggtaggattcaaatgtgtgtcatttagaagtggaagctattagcaccaatgacataaatacatacaagacacagaactaaaatgtcatgttattaacagttattaggttgtcatttaaaaataaagttcctttatatttctgtcccatcaggaaaactgaaggatatggggaatcattggttatcttccattgtgtttttctttatggacaggagctaatggaagtgacagtcatgttcaaaggaagcatttctagaaaaaaggagataatgtttttaaatttcattatcaaacttgggcaattctgtttgtgtaactccccgactagtggatgggagagtcccattgctaaaattcagctactcagataaattcagaatgggtcaaggcacctgcctgtttttgttggtgcacagagattgacttgattcagagagacaattcactccatccctatggcagaggaatgggttagccctaatgtagaatgtcattgtttttaaaactgttttatatcttaagagtgccttattaaagtatagatgtatgtcttaaaatgtgggtgataggaattttaaagatttatataatgcatcaaaagccttagaataagaaaagctttttttaaattgctttatctgtatatctgaactcttgaaacttatagctaaaacactaggatttatctgcagtgttgcagggagataattctgccttaaattgtctaaaacaaaaacaaaaccagccaacctatgttacacgtgagattaaaaccaattttttccccattttttctccttttttctcttgctgcccacattgtgcctttattttatgagccccagttttctgggcttagtttaaaaaaaaaatcaagtctaaacattgcatttagaaagcttttgttcttggataaaaagtcatacactttaaaaaaaaaaaaaaaactttttccaggaaaatatattgaaatcatgctgctgagcctctattttctttctttgatgttttgattcagtattcttttatcataaatttttagcatttaaaaattcactgatgtacattaagccaataaactgctttaatgaataacaaactatgtagtgtgtccctattataaatgcattggagaagtatttttatgagactctttactcaggtgcatggttacagccacagggaggcatggagtgccatggaaggattcgccactacccagaccttgttttttgttgtattttggaagacaggttttttaaagaaacattttcctcagattaaaagatgatgctattacaactagcattgcctcaaaaactgggaccaaccaaagtgtgtcaaccctgtttccttaaaagaggctatgaatcccaaaggccacatccaagacaggcaataatgagcagagtttacagctcctttaataaaatgtgtcagtaattttaaggtttatagttccctcaacacaattgctaatgcagaatagtgtaaaatgcgcttcaagaatgttgatgatgatgatatagaattgtggctttagtagcacagaggatgccccaacaaactcatggcgttgaaaccacacagttctcattactgttatttattagctgtagcattctctgtctcctctctctcctcctttgaccttctcctcgaccagccatcatgacatttaccatgaatttacttcctcccaagagtttggactgcccgtcagattgtttctgcacatagttgcctttgtatctctgtatgaaataaaaggtcatttgttc

SEQ ID NO: 311 - DNA, 1743 bp, Human
cagtatccctcctgacaaaactaacaaaaatcctgttagccaaataatcagccacattcatatttaccgtcaaagtttttatcctcattttacagcagtggagagcgattgccccgggtcccacgttaggaagagagagaactgggatttgcacccaggcaatctggggacagagctgtgatcacaactccatgagtcagggccgagccagccccttcaccaccagccggccgcgccccgggaaggaagtttgtggcggaggaggttcgtacgggaggagggggaggcgcccacgcatctggggctgactcgctctttcgcaaaacgtctgggaggagtccctggggccacaaaactgcctccttcctgaggccagaaggagagaagacgtgcagggaccccgcgcacaggagctgccctcgcgacatgggtcacccgccgctgctgccgctgctgctgctgctccacacctgcgtcccagcctcttggggcctgcggtgcatgcagtgtaagaccaacggggattgccgtgtggaagagtgcgccctgggacaggacctctgcaggaccacgatcgtgcgcttgtgggaagaaggagaagagctggagctggtggagaaaagctgtacccactcagagaagaccaacaggaccctgagctatcggactggcttgaagatcaccagccttaccgaggttgtgtgtgggttagacttgtgcaaccagggcaactctggccgggctgtcacctattcccgaagccgttacctcgaatgcatttcctgtggctcatcagacatgagctgtgagaggggccggcaccagagcctgcagtgccgcagccctgaagaacagtgcctggatgtggtgacccactggatccaggaaggtgaagaagggcgtccaaaggatgaccgccacctccgtggctgtggctaccttcccggctgcccgggctccaatggtttccacaacaacgacaccttccacttcctgaaatgctgcaacaccaccaaatgcaacgagggcccaatcctggagcttgaaaatctgccgcagaatggccgccagtgttacagctgcaaggggaacagcacccatggatgctcctctgaagagactttcctcattgactgccgaggccccatgaatcaatgtctggtagccaccggcactcacgaaccgaaaaaccaaagctatatggtaagaggctgtgcaaccgcctcaatgtgccaacatgcccacctgggtgacgccttcagcatgaaccacattgatgtctcctgctgtactaaaagtggctgtaaccacccagacctggatgtccagtaccgcagtggggctgctcctcagcctggccctgcccatctcagcctcaccatcaccctgctaatgactgccagactgtggggaggcactctcctctggacctaaacctgaaatccccctctctgccctggctggatccgggggacccctttgcccttccctcggctcccagccctacagacttgctgtgtgacctcaggccagtgtgccgacctctctgggcctcagttttcccagctatgaaaacagctatctcacaaagttgtgtgaagcagaagagaaaagctggaggaaggccgtgggcaatgggagagctcttgttattattaatattgttgccgctgttgtgttgttgttattaattaatattcatattatttattttatacttacataaagattttgtaccagtgg

SEQ ID NO: 312 - protein, 335 aa, Human
MGHPPLLPLLLLLHTCVPASWGLRCMQCKTNGDCRVEECALGQDLCRTTIVRLWEEGEELELVEKSCTHSEKTNRTLSYRTGLKITSLTEVVCGLDLCNQGNSGRAVTYSRSRYLECISCGSSDMSCERGRHQSLQCRSPEEQCLDVVTHWIQEGEEGRPKDDRHLRGCGYLPGCPGSNGFHNNDTFHFLKCCNTTKCNEGPILELENLPQNGRQCYSCKGNSTHGCSSEETFLIDCRGPMNQCLVATGTHEPKNQSYMVRGCATASMCQHAHLGDAFSMNHIDVSCCTKSGCNHPDLDVQYRSGAAPQPGPAHLSLTITLLMTARLWGGTLLWT

SEQ ID NO: 313 - DNA, 1466 bp, Human
gccctctagggtagaatcgccaagctttgagagaaggctgtgactgctgtgctctgggcgccagctcgctccagggagtgatgggaatcctgtcattcttacctgtccttgccactgagagtgactgggctgactgcaagtccccccagccttggggtcatatgcttctgtggacagctgtgctattcctggcagctcccccaaaggctgtgctgaaactcgagccccagtggatcaacgtgctccaggaggactctgtgactctgacatgccgggggactcacagccctgagagcgactccattcagtggttccacaatgggaatctcattcccacccacacgcagcccagctacaggttcaaggccaacaacaatgacagcggggagtacacgtgccagactggccagaccagcctcagcgaccctgtgcatctgactgtgctttctgagtggctggtgctccagacccctcacctggagttccaggagggagaaaccatcgtgctgaggtgccacagctggaaggacaagcctctggtcaaggtcacattcttccagaatggaaaatccaagaaattttcccgttcggatcccaacttctccatcccacaagcaaaccacagtcacagtggtgattaccactgcacaggaaacataggctacacgctgttctcatccaagcctgtgaccatcactgtccaagctcccagctcttcaccgatggggatcattgtggctgtggtcactgggattgctgtagcggccattgttgctgctgtagtggccttgatctactgcaggaaaaagcggatttcagctctcccaggataccctgagtgcagggaaatgggagagaccctccctgagaaaccagccaatcccactaatcctgatgaggctgacaaagttggggctgagaacacaatcacctattcacttctcatgcacccggatgctctggaagagcctgatgaccagaaccgtatttagtctccattgtcttgcattgggatttgagaagaaaatcagagagggaagatctggtatttcctggcctaaattccccttggaggacagggagatgctcgagttccaaaagagaaggtttcttccagagtcatctacctgagtcctgaagctccctgtcctgaaagccacagacaatatggtcccaaataaccgactgcacctgctgtcttcagctcttcttgacatcaaggctcttccgttccacatccacacagccaatccaattaatcaaaccactgttattaacagataatagcaacttgggaaatgcttatgttacaggttaccgttgagaacaatcatctaaatctatatgatttcagaaatgttaaaatagactaacctctaccagcacattaaaagtgattgtttctgggtgatttattgatgatttttattttctttatttttctataaagatcatatattactttt

SEQ ID NO: 314 - protein, 303 aa, Human
MGILSFLPVLATESDWADCKSPQPWGHMLLWTAVLFLAAPPKAVLKLEPQWINVLQEDSVTLTCRGTHSPESDSIQWFHNGNLIPTHTQPSYRFKANNNDSGEYTCQTGQTSLSDPVHLTVLSEWLVLQTPHLEFQEGETIVLRCHSWKDKPLVKVTFFQNGKSKKFSRSDPNFSIPQANHSHSGDYHCTGNIGYTLFSSKPVTITVQAPSSSPMGIIVAVVTGIAVAAIVAAVVALIYCRKKRISALPGYPECREMGETLPEKPANPTNPDEADKVGAENTITYSLLMHPDALEEPDDQNRI

SEQ ID NO: 315 - DNA, 899 bp, Human
gttcacgctgacgtcccaaatcttggaagttttgtccccatttgctttctgcttctggggacaaaacttccaagatttgggacgtcagcgtgaactccgtggtcagcacatttcccatgggctccacggttctggaccagcagctgggctgcttatggcagaaggaccacctgctcagtgtctccctgtccgggtacatcaactatctggacagaaacaaccccagcaagcccctgcacgtcatcaagggtcacagtaaatcgatccagtgtctgggaagctgaggatctgggataccacgcagaaggagcacctgttgaagtatgagtaccagcctttcgctgggaagatcaaagacattgcttggactgaagacagtaagaggatcgcccgtggtcggggaaggaagggagaagtttggagcagtcttcctctgggatagtggctcttctgtgggcgagattacaggacacaacaaagtcatcaacagcgtggcatcaagcagagccgccataccgctggcacgggaagcgatgataactgcgcgcattctttgagggacccccattcaagttcaagttcacagttggcgccacagccgtttgtcaactgtgtgcgattctctcaagagcaaaggttaatttaaggacaaagatgaagtcctgtaaactaatctgtcattgttttaccttcctttctttttcagtgcggaattaaaagtaagtttaaagcacctgattgggagtgttttgcgtgttcggaatcacttgtaatgttggctgagacaatccttccttgcactttgaaacactttgagcctttaagagatagcctgagaataataaattcttttcttttaaaaaaaaaaaaaatttaaaaaaaaaaaaaaaaaaaaaaaa

SEQ ID NO: 316 - protein, 77 aa, Human [sequence omitted]

SEQ ID NO: 317 - DNA, 1460 bp, Human
accccatcttcatctggccttgactctgcccttgaggggcctaggggtgcagccagcctgctccgagctcccctgcagatggaggaggccatcctggtcccctgcgtgctggggctcctgctgctgcccatcctggccatgttgatggcactgtgtgtgcactgccacagactgccaggctcctacgacagcacatcctcagatagtttgtatccaaggggcatccagttcaaacggcctcacacggttgccccctggccacctgcctacccacctgtcacctcctacccacccctgagccagccagacctgctccccatcccaagatccccgcagccccttgggggctcccaccggacgccatcttcccggcgggattctgatggtgccaacagtgtggcgagctacgagaacgagggtgcgtctgggatccgaggtgcccaggctgggtggggagtctggggtccgtcctggactaggctgacccctgtgtcgttacccccagaaccagcctgtgaggatgcagatgaggatgaggacgactatcacaacccaggctacctggtggtgcttcctgacagcaccccggccactagcactgctgccccatcagctcctgcactcagcacccctggcatccgagacagtgccttctccatggagtccattgatgattacgtgaacgttccggagagcggggagagcgcagaagcgtctctggatggcagccgggagtatgtgaatgtgtcccaggaactgcatcctggagcggctaagactgagcctgccgccctgagttcccaggaggcagaggaagtggaggaagagggggctccagattacgagaatctgcaggagctgaactgagggcctgtggaggccgagtctgtcctggaaccaggcttgcctgggacggctgagctgggcagctggaagtggctctggggtcctcacatggcgtcctgcccttgctccagcctgacaacagcctgagaaatccccccgtaacttattatcactttggggttcggcctgtgtcccccgaacgctctgcaccttctgacgcagcctgagaatgacctgccctggccccagccctactctgtgtaatagaataaaggcctgcgtgtgtctgtgttgagcgtgcgtctgtgtgtgcctgtgtgcgagtctgagtcagagatttggagatgtctctgtgtgtttgtgtgtatctgtgggtctccatcctccatgggggctcagccaggtgctgtgacaccccccttctgaatgaagccttctgacctgggctggcactgctgggggtgaggacacattgccccatgagacagtcccagaacacggcagctgctggctgtgacaatggtttcaccatccttagaccaagggatgggacctgatgacctgggaggactcttttagttcttacctcttgtggttctcaataaaacagaacg

SEQ ID NO: 318 - protein, 262 aa, Human
MEEAILVPCVLGLLLLPILAMLMALCVHCHRLPGSYDSTSSDSLYPRGIQFKRPHTVAPWPPAYPPVTSYPPLSQPDLLPIPRSPQPLGGSHRTPSSRRDSDGANSVASYENEGASGIRGAQAGWGVWGPSWTRLTPVSLPPEPACEDADEDEDDYHNPGYLVVLPDSTPATSTAAPSAPALSTPGIRDSAFSMESIDDYVNVPESGESAEASLDGSREYVNVSQELHPGAAKTEPAALSSQEAEEVEEEGAPDYENLQELN

SEQ ID NO: 319 - DNA, 967 bp, Human
tgatgggaatcctgtcattcttacctgtccttgccactgagagtgactgggctgactgcaagtccccccagccttggggtcatatgcttctgtggacagctgtgctattcctggctcctgttgctgggacacctgcagctcccccaaaggctgtgctgaaactcgagccccagtggatcaacgtgctccaagaggactctgtgactctgacatgccgggggactcacagccctgagagcgactccattcagtggttccacaatgggaatctcattcccacccacacgcagcccagctacaggttcaaggccaacaacaatgacagcggggagtacacgtgccagactggccagaccagcctcagcgaccctgtgcatctgactgtgctttctgagtggctggtgctccagacccctcacctggagttccaggagggagaaaccatcgtgctgaggtgccacagctggaaggacaagcctctggtcaaggtcatattcttccagaatggaaaatccaagaaattttcccgttcggatcccaacttctccatcccacaagcaaaccacagtcacagtggtgattaccactgcacaggaaacataggctacacgctgtactcatccaagcctgtgaccatcactgtccaagctcccagctcttcaccgatggggatcattgtggctgtggtcactgggattgctgtagcggccattgttgctgctgtagtggccttgatctactgcaggaaaaagcggatttcagccacctggacgtcaaatgattgccatcagaaagagacaacctgaagaaaccaacaatgactatgaaacagctgacggcggctacatgactctgaaccccagggcacctactgacgatgataaaaacatctacctgactcttcctcccaacgaccatgtcaacagtaataactaaagagtaacgttatgccatgtggtcatctaga

SEQ ID NO: 320 - protein, 267 aa, Human [sequence omitted]

SEQ ID NO: 321 - DNA, 1953 bp, Human
gcagaccttgcttcatgagcaagctcatctctggaacaaactggcaaagcatctctgctggtgttcatcagaacagacaccatggcagagcatgattaccatgaagactatgggttcagcagtttcaatgacagcagccaggaggagcatcaagacttcctgcagttcagcaaggtctttctgccctgcatgtacctggtggtgtttgtctgtggtctggtggggaactctctggtgctggtcatatccatcttctaccataagttgcagagcctgacggatgtgttcctggtgaacctacccctggctgacctggtgtttgtctgcactctgcccttctgggcctatgcaggcatccatgaatgggtgtttggccaggtcatgtgcaagagcctactgggcatctacactattaacttctacacgtccatgctcatcctcacctgcatcactgtggatcgtttcattgtagtggttaaggccaccaaggcctacaaccagcaagccaagaggatgacctggggcaaggtcaccagcttgctcatctgggtgatatccctgctggtttccttgccccaaattatctatggcaatgtctttaatctcgacaagctcatatgtggttaccatgacgaggcaatttccactgtggttcttgccacccagatgacactggggttcttcttgccactgctcaccatgattgtctgctattcagtcataatcaaaacactgcttcatgctggaggcttccagaagcacagatctctaaagatcatcttcctggtgatggctgtgttcctgctgacccagatgcccttcaacctcatgaagttcatccgcagcacacactgggaatactatgccatgaccagctttcactacaccatcatggtgacagaggccatcgcatacctgagggcctgccttaaccctgtgctctatgcctttgtcagcctgaagtttcgaaagaacttctggaaacttgtgaaggacattggttgcctcccttaccttggggtctcacatcaatggaaatcttctgaggacaattccaagactttttctgcctcccacaatgtggaggccaccagcatgttccagttataggccttgccagggtttcgagaagctgctctggaatttgcaagtcatggctgtgccctcttgatgtggtgaggcaggctttgtttatagcttgcgcattctcatggagaagttatcagacactctggctggtttggaatgcttcttctcaggcatgaacatgtactgttctcttcttgaacactcatgctgaaagcccaagtagggggtctaaaatttttaaggactttccttcctccatctccaagaatgctgaaaccaagggggatgacatgtgactcctatgatctcaggttctccttgattgggactggggctgaaggttgaagaggtgagcacggccaacaaagctgttgatggtaggtggcacactgggtgcccaagctcagaaggctcttctgactactgggcaaagagtgtagatcagagcagcagtgaaaacaagtgctggcaccaccaggcacctcacagaaatgagatcaggctctgcctcaccttggggcttgacttttgtataggtagatgttcagattgctttgattaatccagaataactagcaccagggactatgaatgggcaaaactgaattataagaggctgataattccagtggtccatggaatgcttgaaaaatgtgcaaaacagcgtttaagactgtaatgaatctaagcagcatttctgaagtggactctttggtggctttgcattttaaaaatgaaattttccaatgtctgccacacaaacgtatgtaaatgtatatacccacacacatacacacatatgtcatatattactagcatatgagtttcatagctaagaaataaaactgttaaagtctccaaact

SEQ ID NO: 322 - protein, 342 aa, Human
MAEHDYHEDYGFSSFNDSSQEEHQDFLQFSKVFLPCMYLVVFVCGLVGNSLVLVISIFYHKLQSLTDVFLVNLPLADLVFVCTLPFWAYAGIHEWVFGQVMCKSLLGIYTINFYTSMLILTCITVDRFIVVVKATKAYNQQAKRMTWGKVTSLLIWVISLLVSLPQIIYGNVFNLDKLICGYHDEAISTVVLATQMTLGFFLPLLTMIVCYSVIIKTLLHAGGFQKHRSLKIIFLVMAVFLLTQMPFNLMKFIRSTHWEYYAMTSFHYTIMVTEAIAYLRACLNPVLYAFVSLKFRKNFWKLVKDIGCLPYLGVSHQWKSSEDNSKTFSASHNVEATSMFQL

SEQ ID NO: 323 - DNA, 1840 bp, Human
cccattaggtgacaggtttttagagaagccaatcacgtcgccgcggtcctggttctaaagtcctcgctcacccacccggactcattctccccagacgccaaggatggtggtcatggcgccccgaaccctcttcctgctgctctcgggggccctgaccctgaccgagacctgggcgggctcccactccatgaggtatttcagcgccgccgtgtcccggcccggccgcggggagccccgcttcatcgccatgggctacgtggacgacacgcagttcgtgcggttcgacagcgactcggcgtgtccgaggatggagccgcgggcgccgtgggtggagcaggaggggccggagtattgggaagaggagacacggaacaccaaggcccacgcacagactgacagaatgaacctgcagaccctgcgcggctactacaaccagagcgaggccagttctcacaccctccagtggatgattggctgcgacctggggtccgacggacgcctcctccgcgggtatgaacagtatgcctacgatggcaaggattacctcgccctgaacgaggacctgcgctcctggaccgcagcggacactgcggctcagatctccaagcgcaagtgtgaggcggccaatgtggctgaacaaaggagagcctacctggagggcacgtgcgtggagtggctccacagatacctggagaacgggaaggagatgctgcagcgcgcggacccccccaagacacacgtgacccaccaccctgtctttgactatgaggccaccctgaggtgctgggccctgggcttctaccctgcggagatcatactgacctggcagcgggatggggaggaccagacccaggacgtggagctcgtggagaccaggcctgcaggggatggaaccttccagaagtgggcagctgtggtggtgccttctggagaggagcagagatacacgtgccatgtgcagcatgaggggctgccggagcccctcatgctgagatggaagcagtcttccctgcccaccatccccatcatgggtatcgttgctggcctggttgtccttgcagctgtagtcactggagctgcggtcgctgctgtgctgtggagaaagaagagctcagattgaaaaggagggagctactctcaggctgcaagtaagtatgaaggaggctgatccctgagatccttgggatcttgtgtttgggagccatgggggagctcacccaccccacaattcctcctctggccacatctcctgtggtctctgaccaggtgctgtttttgttctactctaggcagtgacagtgcccagggctctaatgtgtctctcacggcttgtaaatgtgacaccccggggggcctgatgtgtgtgggttgttgaggggaacaggggacatagctgtgctatgaggtttctttgacttcaatgtattgagcatgtgatgggctgtttaaagtgtcacccctcactgtgactgatatgaatttgttcatgaatatttttctgtagtgtgaaacagctgccctgtgtgggactgagtggcaagtccctttgtgacttcaagaaccctgacttctctttgtgcagagaccagcccacccctgtgcccaccatgaccctcttcctcatgctgaactgcattccttccccaatcacctttcctgttccagaaaaggggctgggatgtctccgtctctgtctcaaatttgtggtccactgagctataacttacttctgtattaaaattagaatctgagtataaatttactttttcaaattatttccaagagagattgatgggttaattaaaggagaagattcctgaaatttgagagacaaaataaa

SEQ ID NO: 324 - protein, 338 aa, Human
MVVMAPRTLFLLLSGALTLTETWAGSHSMRYFSAAVSRPGRGEPRFIAMGYVDDTQFVRFDSDSACPRMEPRAPWVEQEGPEYWEEETRNTKAHAQTDRMNLQTLRGYYNQSEASSHTLQWMIGCDLGSDGRLLRGYEQYAYDGKDYLALNEDLRSWTAADTAAQISKRKCEAANVAEQRRAYLEGTCVEWLHRYLENGKEMLQRADPPKTHVTHHPVFDYEATLRCWALGFYPAEIILTWQRDGEDQTQDVELVETRPAGDGTFQKWAAVVVPSGEEQRYTCHVQHEGLPEPLMLRWKQSSLPTIPIMGIVAGLVVLAAVVTGAAVAAVLWRKKSSD

SEQ ID NO: 325 - DNA, 1822 bp, Human
ttgccagacagcatagaggctgaggctggggccaggacccagacagagacacacggtcactgcagctgaagccgctgcccctgctacaggcaccaccaggaccagctgatcattccagcccacagcaatggagccacatgactcctcccacatggactctgagttccgatacactctcttcccgattgtttacagcatcatctttgtgctcggggtcattgctaatggctacgtgctgtgggtctttgcccgcctgtacccttgcaagaaattcaatgagataaagatcttcatggtgaacctcaccatggcggacatgctcttcttgatcaccctgccactttggattgtctactaccaaaaccagggcaactggatactccccaaattcctgtgcaacgtggctggctgccttttcttcatcaacacctactgctctgtggccttcctgggcgtcatcacttataaccgcttccaggcagtaactcggcccatcaagactgctcaggccaacacccgcaagcgtggcatctctttgtccttggtcatctgggtggccattgtgggagctgcatcctacttcctcatcctggactccaccaacacagtgcccgacagtgctggctcaggcaacgtcactcgctgctttgagcattacgagaagggcagcgtgccagtcctcatcatccacatcttcatcgtgttcagcttcttcctggtcttcctcatcatcctcttctgcaacctggtcatcatccgtaccttgctcatgcagccggtgcagcagcagcgcaacgctgaagtcaagcgccgggcgctgtggatggtgtgcacggtcttggcggtgttcatcatctgcttcgtgccccaccacgtggtgcagctgccctggacccttgctgagctgggcttccaggacagcaaattccaccaggccattaatgatgcacatcaggtcaccctctgcctccttagcaccaactgtgtcttagaccctgttatctactgtttcctcaccaagaagttccgcaagcacctcaccgaaaagttctacagcatgcgcagtagccggaaatgctcccgggccaccacggatacggtcactgaagtggttgtgccattcaaccagatccctggcaattccctcaaaaattagtccctgcttccaggcctgaagtcttctcctccatgaacatcatggactgagctgggggaagaagggatatctactgtggtctgggcaccacctctgtgggcactggtgggccattagatttggaggctacctcacctgggcagggatgatggcagagccaggctgttggaaaatccagaactcaaatgagccccttcatccgcctgtgggcgcatactacagtaactgtgactgatgactttatcctgagtcccttaatcttatggggccggaaggaatgtcagggccaggtgcagaccttgggggaagactttaaaccacctagttctccccgatggggcatcggtctaaagctttgggggagtgggcgcagtggctcacacctgtaatcccagcactttgggaggccgaggtgggcagatcatgggtcaagagatcgagaccatcctggccaacattgtaaaaccccatctctactaaaacatacaaaaattagccgggcatggtggcacacgcctgtagtcccagctactcaggaggctgaggcaggagaatcgcttgaacctgggaggcagaggttgcagtgaacctagattgcaccattgcactctagcctggcaacagagcgagattccatctcaaaaaaaaaaaaaaaaaaaaaaaaaa

SEQ ID NO: 326 - DNA, 1976 bp, Human
gccacacggtctttgagctgagtcgaggtggaccctttgaacgcagtcgccctacagccgctgattccccccgcatcgcctcccgtggaagcccaggcccgcttcgcagctttctccctttgtctcataaccatgtccaccaacgagaatgctaatacaccagctgcccgtcttcacagattcaagaacaagggaaaagacagtacagaaatgaggcgtcgcagaatagaggtcaatgtggagctgaggaaagctaagaaggatgaccagatgctgaagaggagaaatgtaagctcatttcctgatgatgctacttctccgctgcaggaaaaccgcaacaaccagggcactgtaaattggtctgttgatgacattgtcaaaggcataaatagcagcaatgtggaaaatcagctccaagctactcaagctgccaggaaactactttccagagaaaaacagccccccatagacaacataatccgggctggtttgattccgaaatttgtgtccttcttgggcagaactgattgtagtcccattcagtttgaatctgcttgggcactcactaacattgcttctgggacatcagaacaaaccaaggctgtggtagatggaggtgccatcccagcattcatttctctgttggcatctccccatgctcacatcagtgaacaagctgtctgggctctaggaaacattgcaggtgatggctcagtgttccgagacttggttattaagtacggtgcagttgacccactgttggctctccttgcagttcctgatatgtcatctttagcatgtggctacttacgtaatcttacctggacactttctaatctttgccgcaacaagaatcctgcacccccgatagatgctgttgagcagattcttcctaccttagttcggctcctgcatcatgatgatccagaagtgttagcagatacctgctgggctatttcctaccttactgatggtccaaatgaacgaattggcatggtggtgaaaacaggagttgtgccccaacttgtgaagcttctaggagcttctgaattgccaattgtgactcctgccctaagagccatagggaatattgtcactggtacagatgaacagactcaggttgtgattgatgcaggagcactcgccgtctttcccagcctgctcaccaaccccaaaactaacattcagaaggaagctacgtggacaatgtcaaacatcacagccggccgccaggaccagatacagcaagttgtgaatcatggattagtcccattccttgtcagtgttctctctaaggcagattttaagacacaaaaggaagctgtgtgggccgtgaccaactataccagtggtggaacagttgaacagattgtgtaccttgttcactgtggcataatagaaccgttgatgaacctcttaactgcaaaagataccaagattattctggttatcctggatgccatttcaaatatctttcaggctgctgagaaactaggtgaaactgagaaacttagtataatgattgaagaatgtggaggcttagacaaaattgaagctctacaaaaccatgaaaatgagtctgtgtataaggcttcgttaagcttaattgagaagtatttctctgtagaggaagaggaagatcaaaacgttgtaccagaaactacctctgaaggctacactttccaagttcaggatggggctcctgggacctttaacttttagatcatgtagctgagacataaatttgttgtgtactacgtttggtattttgtcttattgtttctctactaagaactctttcttaaatgtggtttgttactgtagcactttttacactgaaactatacttgaacagttccaactgtacatacatactgtatgaagcttgtcctctgactaggtttctaatttctatgtggaatttcctatcttgcagcatcctgtaaataaacattcaagtccacccttaaaaaaaa

SEQ ID NO: 327 - protein, 529 aa, Human [sequence omitted]

SEQ ID NO: 328 - DNA, 2669 bp, Human
aaaagagtctcgccggcgtccccgcccgcacactcgcgcacactcgcgctcgggcgcacacggagcagggaccggcgcccggagcgagccagggagcggctaaccggggacccaccgcgcggagccagcctagctgccagcgagcccaacccgcgacgacccacgcccctgagccccgcagccgacccctgccggccggtgtccccaccgccatccctgacccatggcgctgaagaggattcagaaagaattgagtgatctacagcgcgatccacctgctcactgttcagctggacctgtgggagatgacttgttccactggcaagccactattatggggcctcctgatagcgcatatcaaggtggagtcttctttctcactgtacattttccgacagattatccttttaaaccaccaaagattgctttcacaacaaaaatttaccatccaaacataaacagtaatggaagtatttgtctcgatattctgaggtcacaatggtcaccagctctgactgtatcaaaagttttattgtccatatgttctctactttgtgatcctaatccagatgaccccttagtaccagatattgcacaaatctataaatcagacaaagaaaaatacaacagacatgcaagagaatggactcagaaatatgcaatgtaaaaatcaaaaacattttcatatataccagagtactgtaaaatctaggtttttttcaacattagcagtaaattgagcactgtttactgtttcattgtaccatgaaaccatttgatttttacccattttaaatgtgtttctgaagcaagacaaaacaaacttccaaaaatacccttaagactgtgatgagagcatttatcattttgtatgcattgagaaagacatttattatggtttttaagatacttggacatctgcatcttcagcttacaagatctacaatgcagctgaaaagcaaccaaattattttttgctgaaactagatgtttttacatgagaaatactgtatgtgttgtctaagatgtcagttttataaatctgtattcagatttcattctttgttagctcactttataatttgtatttttttactgtatagactaaatatattctatttacatgtatgtcaactcattacttttttcctgtgaacagtattgaaaaaccccaacggctgataattaagtgaattaactgtgtctcccttgtcttaggatattctgtagattgattgcagatttcttaaatctgaaatgatctttacactgtaattctcagcatactgattatggagaaacacttgttttgattttgttatacttgacttaactttattgcaatgtgaattaattgcactgctaagtaggaagatgtgtaacttttatttgttgctattcacatttgaattttttcctgtataggcaatattatattgacaccttttacagatcttactgtagctttttccatataaataaaatgctttttctactatttgtcttgattacttaaaaaaataaaaatataagtaaggatcaaaactctaaaattttgcatgaaaattacatccaaattgtgaaaatcagatctattttgtttgccattagtcaccattagttatataaattttattgttttaggttagtatctctttactaaattgtcagtctataagataatatatgttgatcccttgctgtagaggagaatttagagtaatttggggtttgtcttggattatatctaaatggattatttgttaaaagtactgaaatgagtataaggcagtatcacccatccaaaagaaaggtctttatagacctgcacagtcactagattaattcattaaaatgcccccaccctgatgtaattgacattacatttcttaacattttaaaatctagaatttctaaaatggaatttaatgccatcacaatttgaaaaactttttttttttttttactatagaagttacaaaggaagttctaaaattatgcctccctctgtttttataagttgccatcgaaaagtgatttaaataagcaggttatctttatagattttaaagaaaactagaaagttttaatgttttaacttggggaaaaatacatctctttaatgtttagcatgcttgtcaaccttgagtgagtgtcatttttaagaacagttgtagcccttctgattattgcagtagctgtagaagtatgtaagaatatgtgatgggtgtagtcattagcaaagcatttaaatcacttgagtattttgtcatggttcattattattaaagcacaaaataacctattgttagaaaatatgtgtttttataaatgaatgtaaaataattaaatgaattgtgaaatggatgtttaagaaaatataggcttaaaaagtaaatctataaaatgatgtcttaaaacagccatatcatgaaaaattctacttagctatattattataagctacatttgccctgaatttgaacactcaacatcactagatttaaatatttagtatattttgatagtaaagggttttgtttcttgaatatcttcactttaaacaaaaaaaaaaaacaactttcatttgtgtggcatttatttttggaagtgtcttcttttttttctttattaaagtttttgaaacttgcaaaaaaaaaaaaaaaaaa

SEQ ID NO: 329 - protein, 147 aa, Human
MALKRIQKELSDLQRDPPAHCSAGPVGDDLFHWQATIMGPPDSAYQGGVFFLTVHFPTDYPFKPPKIAFTTKIYHPNINSNGSICLDILRSQWSPALTVSKVLLSICSLLCDPNPDDPLVPDIAQIYKSDKEKYNRHAREWTQKYAM

SEQ ID NO: 330 - DNA, 1921 bp, Human
gaattcggcacgagggtgaatcaggcgccgggtagtgggttgctgggctgggcttgctgaggtagaggcagcgccaagaagaggcctttgccgctggtcgggattgggatgtcgaagaacacagtgtcgtcggcccgcttccggaaggtggacgtggatgaatatgacgagaacaagttcgtggacgaagaagatgggggcgacggccaggccgggcccgacgagggcgaggtggactcctgcctgcggcaaggaaacatgacagctgccctacaggcagctctgaagaacccccctatcaacaccaagagtcaggcagtgaaggaccgggcaggcagcattgtcttgaaggtgctcatctcttttaaagctaatgatatagaaaaggcagttcaatctctggacaagaatggtgtggatctcctaatgaagtatatttataaaggatttgagagcccgtctgacaatagcagtgctatgttactgcaatggcatgaaaaggcacttgctgctggaggagtagggtccattgttcgtgtcttgactgcaagaaaaactgtgtagtctggcaggaagtggattatctgcctcgggagtgggaattgctggtacaaagaccaaaacaaccaaatgccaccgctgccctgtgggtagcatctgtttctctcagctttgccttcttgctttttcatatctgtaaagaaaaaaattacatatcagttgtcctttaatgaaaattgggataatatagaagaaattgtgttaaaatagaagtgtttcatcctttcaaaaccatttcagtgatgtttataccaatctgtatatagtataatttacattcaagtttaattgtgcaacttttaacccctgttggctggttttttgttctgttttgttttgtattatttttaactaatactgagagatttggtcagaatttgaggccagtttcctagctcattgctagtcaggaaatgatatttataaaaaatatgagagactggcagctattaacattgcaaaactggaccatatttcccttatttaataagcaaaatatgtttttggaataagtggtgggtgaataccactgccaagttatagctttgtttttgcttgcctcctgattatctgtactgtgggtttaagtatgctactttctctcagcatccaataatcatggcccctcaatttatttgtggtcacccagggttcagagcaagaagtcttgctttatacaaatgtatccataaaatatcagagcttgttgggcatgaacatcaaacttttgttccactaatatggctctgtttggaaaaaactgcaaatcagaaagaatgatttgcagaaagaaagaaaaactatggtgtaatttaaactctgggcagcctctgaatgaaatgctactttctttagaaatataatagctgccttagacattatgaggtatacaactagtatttaagataccatttaatatgccccgtaaatgtcttcagtgttcttcagggtagttgggatctcaaaagatttggttcagatccaaacaaatacacattctgtgttttagctcagtgttttctaaaaaaagaaactgccacacagcaaaaaattgtttactttgttggacaaaccaaatcagttctcaaaaaatgaccggtgcttataaaaagttataaatatcgagtagctctaaaacaaaccacctgaccaagagggaagtgagcttgtgcttagtatttacattggatgccagttttgtaatcactgacttatgtgcaaactggtgcagaaattctataaactctttgctgtttttgatacctgctttttgtttcattttgttttgttttgtaaaaatgataaaacttcagaaaataaaatgtcagtgttgaataaaaaaaaaaaaaaaaaactcgac

SEQ ID NO: 331 - protein, 151 aa, Human
MSKNTVSSARFRKVDVDEYDENKFVDEEDGGDGQAGPDEGEVDSCLRQGNMTAALQAALKNPPINTKSQAVKDRAGSIVLKVLISFKANDIEKAVQSLDKNGVDLLMKYIYKGFESPSDNSSAMLLQWHEKALAAGGVGSIVRVLTARKTV

SEQ ID NO: 332 - DNA, 3244 bp, Human
ccttgatgtggagagtgagtatatctgttccctggctttggagtgcctggcccatctcttcagttggattcctctgtctgccagcatcaccccatccctccttaccaccatcttccactttgcacgatttggctgtgacatccgggccagaaagatggcgtcagttaacggcagcagccagaactgtgtctcgggtcaggagcgcggccggctgggggtcctggccatgtcctgcatcaatgaactcatgtccaagaactgtgtgcctatggaatttgaggagtatttactgcgtatgttccagcagactttctacctcctgcagaaaatcaccaaggataacaatgcccacacagtgaagagcaggctagaagagctcgatgagagctatatcgagaagtttactgactttcttcggctctttgtgagtgttcacctaagaagaatcgagtcttactcccagttccctgtggtggagtttttgacacttttgttcaagtacacatttcatcagcctactcatgaaggttacttctcttgtttggatatctggacgctgtttttggactatctgacaagtaaaattaaaagtcgtcttggagacaaggaagcagttctcaacaggtacgaagatgccctggtgctcctgctcacagaggtgttgaatcgaatccagttcagatacaaccaagcccagctggaggagttggatgatgagactctggatgacgatcagcagacggagtggcagcggtacttacggcagagcttggaggtggtggccaaagtgatggagctcctgcccacgcacgccttctccacactgttccctgttcttcaggacaatttagaagtttatttgggattacaacagtttatagtcacttcagggtcaggacacaggttgaacatcacggcggagaacgactgccggcggctgcactgctccctgagagacttgagctccctgctgcaggccgtgggccgcctggccgagtactttatcggggatgtgtttgctgcacggttcaatgatgccctcacagtcgtggaaaggttggtcaaagtcactctgtacggatctcagataaaattgtacaacattgaaactgctgtgccatcagtattgaaacctgacctcattgatgtgcatgctcagtccctggctgcgctgcaggcttactctcactggttagcacagtattgcagtgaagttcaccggcagaacacgcagcagttcgtgacactcatctctactaccatggatgcaatcacacctctaatcagcaccaaggtccaagacaagctgctgctatctgcgtgccacttactggtctcactggccaccaccgtgcggcccgtctttctgatcagcatccctgcagtgcagaaagtattcaacagaatcactgatgcctctgccctgcgacttgtcgataaggcccaggtgttggtgtgccgagccctctctaacatcttgctgcttccgtggccaaaccttccagagaatgagcagcagtggcccgtgcgctccatcaaccacgccagcctcatctctgcactctcccgggactatcgcaacctgaagcccagtgctgttgccccacagagaaagatgccactggatgacaccaaactgattatccaccagacactcagcgtcttagaagatattgtggagaatatctcgggggagtccaccaagtctcgacagatttgctaccagtcgctgcaggaatctgttcaggtctccctggccctctttccagcttttatccatcagtcagatgtgactgatgagatgctgagcttcttcctcactctgtttcgaggccttagagtacagatgggtgtgcctttcactgagcaaatcatacagactttcctcaacatgtttaccagagagcagttagccgagagcatcctccacgagggcagcacaggctgccgggtggtggagaagtttctgaagatcctgcaggtggtggtccaggagccaggccaggtgttcaagcccttcctccccagcatcatcgccctgtgcatggagcaagtgtatcccatcattgccgagcgtccctcccctgatgtgaaggccgagctgtttgagctccttttccggacgctccatcacaactggaggtacttcttcaagtccaccgtgctggccagtgtccagagggggatcgctgaggagcagatggagaatgagccccagttcagtgccatcatgcaggctttcggacagtcctttctccagcccgacatccacctttttaaacaaaatctcttctacttggagactctcaacaccaagcagaagctgtaccacaagaagatcttccggactgccatgctgttccagtttgtgaacgtgctgctccaggtcctggtccacaagtcccatgatcttctgcaggaggagattggcatcgccatctacaacatggcctcagtcgactttgatggcttctttgccgccttcctcccagagttcctgaccagctgtgatggtgtggatgccaaccagaaaagtgtgctggggcggaatttcaagatggatcgggacctgccctcattcacccagaatgtgcacaggctggtcaacgacctgcgctactacagactctgcaacgacagcctgccccctggcactgtgaagctctaggcctgctactgcctggggacacggacttctgctgctgccacctgcgccagccctaccttccaccacagatgtctcccagatgggccttggtcacactccttggcttctcccaccgcaagcaacgctgcctgcctctgccgctcctccacatcttgccgctgcccagcagagctggcttctgggtccacctgagcactggacggtgctcccagggcgttggagcaggcggaggggtgtgtggccaggtactaggaggcaccaggaaatcccgcggggtggcccatgcagaccaggcgcacgtggctcatggggcagaattgccaaggacagctcacgacagtgccaccttctcaccattccagccaaggagagatgtgacgttggaactgctctggcacttctgtcaagcctcccccgccccaattgccttgagatctctgctctttgtcagagatttgcaaagactcacgtttttgttgttttctcatcattccattgtgatactaagaaactaagaagcttaatgaaaagaaataaaatgcctatgttgttgttctagaaaaaaaaaaaaaaaaa

SEQ ID NO: 333 - DNA, 716 bp, Human
ggctggggaacaagcagctgtccctgagcccagaagagtatgtgtttgctgcgctgaacctgtacacagacatcatcaacatcttcctgtacatcctcaccatcattggccgcgccaaggagtagccgagctccagctcgctgtgcccgctcaggtggcacggctggcctggaccctgcccctggcacggcagtgccagctgtacttcccctctctcttgtccccaggcacagcctagggaaaaggatgcctctctccaaccctcctgtatgtacactgcagatacttccatttggacccgctgtggccacagcatggcccctttagtcctcccgcccccgccaaggggcaccaaggccacgtttccgtgccacctcctgtctactcattgttgcatgagccctgtctgccagcccaccccagggactgggggcagcaccaggtcccggggagagggattgagccaagaggtgagggtgcacgtcttccctcctgtcccagctccccagcctggcgtagagcacccctcccctcccccccacccccctggagtgctgccctctggggacatgcggagtgggggtcttatccctgtgctgagccctgagggcagagaggatggcatgtttcaggggagggggaagccttcctctcaatttgttgtcagtgaaattccaataaatgggatttgctctctgcaaaaaaaaaaaaaaaaa

SEQ ID NO: 334 - DNA, 6216 bp, Human
gcgggcaaggcgggcggagcgcactggaactcaagggggcgcacagcggcgcgctcgcaccgctcggctccgcgcggctctaggaggtggcggcggtggcggtggcggcggtggcggcggcggcggcggcggggcgcagggctgagcgagcgtccgggttccggggctccggggaaggcggttgcagctcctgagtgcagcgcggcttcctgccactgtcccggcccggccacctctctgtcatggctctggcggacagcacacgtggattacccaacgggggcggcggcgggggcggcagtggctcctcgtcgtcctccgcggagccaccgctcttccccgacatcgtggagctgaacgtggggggccaggtgtacgtgacccggcgctgcacggtggtgtcggtgcccgactcgctgctctggcgcatgttcacgcagcagcagccgcaggagctggcccgggacagcaaaggccgcttctttctggaccgggacggcttcctcttccgctacatcctggattacctgcgggacttgcagctcgtgctgcccgactacttccccgagcgcagccggctgcagcgcgaggccgagtacttcgagctgccagagctcgtgcgccgcctcggggcgccccagcagcccggcccggggccgccgccctcgcggcgcggggtgcacaaggagggctcgctgggtgacgagctgctgccgcttggctactcggagcccgaacagcaggagggcgcctctgccggggcgccgtcgcccacgctggagctggctagccgcagtccgtccgggggcgcggcgggcccgctgctcacgccgtcccagtcgctggacggcagccggcgctcgggctacatcaccatcggctaccgcggctcctacaccatcgggcgggacgcgcaggcggacgccaagttccggcgagtggcgcgcatcaccgtttgcggaaagacgtcgctggccaaggaggtgtttggggacaccctgaacgaaagccgggaccccgaccgtcccccggagcgctacacctcgcgctattacctcaagttcaacttcctggagcaggccttcgacaagctgtccgagtcgggcttccacatggtggcgtgcagctccacgggcacctgcgcctttgccagcagcaccgaccagagcgaggacaagatctggaccagctacaccgagtacgtcttctgcagggagtgagctccccagaccccctcgccactccagcgcccagtccttctcctgcccgagagatgattacagagcctcttgtcccacctttgtcccctggctgctgccctcccattctccccctccagtagtagctgggtgagacctgtccgcccaccttccctccactacagaacctgcagccgcaaatcctctgggctgcttcgtcttctttggacctcctgaaccgagagaacccagaggaacccccaccccacccccacctaccactccatgctttctctactccctgcctcaaaccacccctcccccagatggtacttcagtttggatctattgggggagtgtggccacagaccgggggatgattgaattgttcagaacctgattggaccgtgtccaatgtgcggaagatttccttgaaatcttctcaagctcttatgactcactgggggtttaagagatcaggattggttccactgtctggggttagtgttttacaaggtcattacacagtctttttgacctcttttgaaggtagagttttagaaggctggatggaagattctgagcctggaattaggaccccatggaggcagttcagtaactaaactaataaagttttgaaaagttacacgtaaagtagaagaatctagtgcgtgggacagtaaaggatcctttctcgtacagaataaaaggtctcagcctgtagcttaaacttatagaaagtgatccgcctgcctgcagaggcgcccttttcagctgctgctcgccagaagcccttgattccactggttgacatggcagcagttactggcaagagggagaaaggacgctgccgcctaagagtgcaaggctgctcaggtctccaagcgccgtaggaggtcacctggcagtgactgtagggagctgggtcatagtgcacgtcgtgggtattaggaaagcctgtattctttcaatgaatgtcagtaggaccttcctttagctgtaagacttggtgggcggggtggggtggggagggaggaaagggtaggaagggtgggaagggagaagcagacatagtcatttatgatttgaaagttggaagtttgtaccatctgtttgagtatatgcacatttaaaaaatatcatatagtaaatgcaaacatgccaagtattttataaagattaataacagacctactcttacctggcagtttacttaacttactgttttgagtcctaaacttagagttgttaatgcttatatataatctaaccaaagagttacccagtagggttttagtttttgaacttttattttcttgttgattataaatcctgattttggaatctattgcgcaaaagaagtttcattttggttacttagacctaagatcacttattaaaaatccttattttctccaagcccagcaaacgttgacttctgggcaaacctgaaaacctgaaaatgccactttcatgcagtttgtttgaagttaagtggaatcctttcaaatgacgagctgcagagaactcagcaccaagggctgcctatctgtagatagctgtaaaatggaatatttttaaatgaaggcaaataagtacttaaaagtgagctgagcaataaaatggtccaataataggtaaatgcaacagaaacagaaggagacctggttgccttatgcctttactcttacatggaataaattcccaatgcatatcctatgtaaaccataagtgaagggaaataaacctcgtcatgctccatgctgtgaggtgtcctttggatattctgtgatgacagagaagcctattttgttttgttttcagcatctttctctgatgtacgtttttaaggattttgtaagagctgttttcagtgtttaaattagtgctatttttccttgtttttaaaaatgaatctcgtactgtatcttactatgtccatacagatgttacaaatcgacagttttattcttagactcatgtgatccaagctgtatataccatatataaacattttacatgaatcatttagttttttaattcatttactaatgctataaaatttcctatattaccccagtaatttgcatcagctggtttatatactaaagcaacatgttttgatgagtttcttacatccttatcgaggaattgggttaggaaaaaatacataattgtaaaactgagtttgctgtattatactttttttcttgagtattagttgtattactaatcatatgttgattaactgtctacttaaagtcaaggtacctgtatttttaatccactaatttttttttagttgggaaatagatttcaagtcttttattagactaacattttttgagaagtaaaattgactttatatacaaagcctgtaattttaggcgaaatggaagcagaaatctaggaagttgtgcttgcttgtatggtctcagactaagtaatgcatcagaattcatctgtttgaagcctgaaataatttaggactctgattcactgaccaaaagtcagtgttgcagagatttctctaccccgtatggtattttgttagattgttcaacaggaagcacatgattgagaacatcttgggacagaccaaaaccactgacagatggcaaggctcggcgattctgatttcccttctcaaatctgctcaactccaagagtcttgagaaactgctaaaattttgcctctgtcactcaagtcttacaaatgttatcttgtaaacctttgaggtgaactattccactgtcttgtacataggcatcttattcactgcaccctgtcacacccagcaccccccgccccgcacattatttgaaagactgggaatttaatggttagggacagtaaatctacttctttttccagggacgactgtcccctctaaagttaaagtcaatacaagaaaactgtctatttttagcctaaagtaaaggctgtgaagaaaattcattttacattgggtagacagtaaaaaacaagtaaaataacttgacatgagcacctttagatcccttcccctccatgggctttgggccacagaatgaacctttgaggcctgtaaagtggattgtaatttcctataagctgtaatagtggaggtattgtgggttcatttgagtaagccctccaaagataccattcaaataacctgggagaatgtcataaattattcagataattatcactgcatgaatctgattcagaggcatgcatttacatatgttgccctaattaccatttgatgatcataaatacaagtgaatgacattggacttttagtaacaaacttaatttttaaaaaagtgtagacaatggtggttaaaaaaaaaaaaaacaggtgccaggttctgtgtgtttgcaccaagtaattgacatgttttttgtttaatacatgtggaccatgaacagtattcattctactttttcaaatgatatgctgtagaaaatattccttgaagatgtgagatttaaaaatttttccctttcaatgttgttttaattgtatttcttacttggtttttttgattgatagcacagtgataaatcataatactagacaaaattgtcttctctttcaaaccagagccatatatatgtctgtatatatgggacctactgcttctctgaggaaatgcataatctgttaatatcagacaaaatgagcaattggcagtgctcataatatattccaatttttattggaattttcgatggaatgttatttcaataaagccatgtaaggtgaaactttgataactttttactcttcaagttagggtaaattctgatccaatattcaattcatttgtgtactcccacatgcaaaatgctaaattacaatgcagacattaagaaaaagtattgactggaggggttgaattccttgagaatttattttatagtctaaatcacaaatactttactcaatttagtttttaaaatagtaaactgaatatttttgttgtaagcctatcagagtcaatccttcgtttggaattgttttcctgtttttccttactataaatcatttaaaaactgaattcattttcttagatggcataagtctgtctcttgagaaataagtaaaatactcctattttcagtatctgtagcacctgaaataggtctttgtatagccagaaacaagttatgttgaagttagcttttctttgtcaacagttttggacaataaaaatctgaaagtattaacacttgattttctactggggcccttcaaacttggttggaagaaattcaaccagaatatctacattagagtataatcatgtgtggtaggaagatggactagttaatcaagatttgttgtcacttaaattttttgtgatttttttccaagccagtttttttaaattctaaatgtgttttgaggtatgggtacattaattgtaatgtaaactattatacaactgtttttgcgactttataggcaggtaaattttgctattactattgaatacaaatgacaattcatttatgaccactcaaacagcgttagtaaccatttagtgacaaaggattaaaacatccatctggatgttaattttgaagatgtaaattatatgttgtttaaatttttccaggcatctgaaaaccttatctgctagacaatgtaagattcacacagagttatctgggattctgattttttaaatagtacatatcattaaaccattttctctaaatgtaagaagagcagaaaaaatcttataagattatcagatttttctaatgacacagaaatgtaagaaaaaaatccctttatattgaaaaaagatgcagtcaaagtcttttcagacatgcccaaactttgagaattccttcaaccatctaatgctataaagatttttgttcttcctgttcacaaccagttgtataacagaaatactagctactgttttccttcctgtgtgtgaagtaatgaatcattgattatgtgacttgttatgtattcaattaaacactaaagaataaaacattcactccttt

SEQ ID NO: 335 - DNA, 4056 bp, Human
gggattctcggttcttccccctcctcccagagctgggctaccccgggagctgagggtcagatgtggaaggaaagtgggtgctgggttttcacggagtatgcctgccctgccccgggaggactgtgtttgagcttggactcgctcgctgctgaattcctgtttgttattcttttttcttccaggctagctggaaggaccagctagcctggactttggcttctttgcccgggagccctggcatgatggggtgagggctcttggtgggttagtggagagctgggggctggcccttccccatcttcttttctacccaccccctccccgccccccgccaggcccagccaccatcagtcacgtcactcctgggactgaggaggcaggggagggataaggggcagagatggaggccccactccccgaggttgcctagacaacatgagaaatcgtggccagggcctcttccgcctgcggagccgctgcttcctgcatcagtcactcccgctgggggcggggcggaggaaggggttggatgtggcagagccaggccccagccggtgccgctcagactcccccgctgtcgccgccgtggtcccagccatggcatcctatccatctggctctggcaagcccaaggccaaatatccctttaagaagcgggccagcctgcaggcctccactgcagctccagaggctcggggtggtctgggggcccctccgctgcagtctgcccgatccctgccgggccccgccccctgcctcaagcacttcccgctcgacctgcgcacgtctatggatggcaaatgcaaggagatcgccgaggagctgttcacccgctcactggctgagagcgagctccgtagtgccccgtatgagttccccgaggagagccccattgaacagctggaggagcggcggcagcggctggagcggcagatcagccaggatgtcaagctggagccagacatcctgcttcgggccaagcaagatttcctgaagacggacagtgactcggacctacagctctacaaggaacagggtgaggggcagggtgaccggagcctgcgggagcgtgatgtgctggaacgggagtttcagcgggtcaccatctctggggaggagaagtgtggggtgccgttcacagacctgctggatgcagccaagagtgtggtgcgggcgctcttcatccgggagaagtacatggccctgtccctgcagagcttctgccccaccacccgccgctacctgcagcagctggctgaaaagcctctggagacccggacctatgaacagggccccgacacccctgtgtctgctgatgccccggtgcacccccctgcgctggagcagcacccgtatgagcactgtgagccaagcaccatgcctggggacctgggcttgggtctgcgcatggtgcggggtgtggtgcacgtctacacccgcagggaacccgacgagcattgctcagaggtggagctgccataccctgacctgcaggaatttgtggctgacgtcaatgtgctgatggccctgattatcaatggccccataaagtcattctgctaccgccggctgcagtacctgagctccaagttccagatgcatgtgctactcaatgagatgaaggagctggccgcccagaagaaagtgccacaccgagatttctacaacatccgcaaggtggacacccacatccatgcctcgtcctgcatgaaccagaagcatctgctgcgcttcatcaagcgggcaatgaagcggcacctggaggagatcgtgcacgtggagcagggccgtgaacagacgctgcgggaggtctttgagagcatgaatctcacggcctacgacctgagtgtggacacgctggatgtgcatgcggacaggaacactttccatcgctttgacaagtttaatgccaaatacaaccctattggggagtccgtcctccgagagatcttcatcaagacggacaacagggtatctgggaagtactttgctcacatcatcaaggaggtgatgtcagacctggaggagagcaaataccagaatgcagagctgcggctctccatttacgggcgctcgagggatgagtgggacaagctggcgcgctgggccgtcatgcaccgcgtgcactcccccaacgtgcgctggctggtgcaggtgccccgcctctttgatgtgtaccgtaccaagggccagctggccaacttccaggagatgctggagaacatcttcctgccactgttcgaggccactgtgcaccctgccagccacccggaactgcatctcttcttagagcacgtggatggttttgacagcgtggatgatgagtccaagcctgaaaaccatgtcttcaacctggagagccccctgcctgaggcgtgggtggaggaggacaacccaccctatgcctactacctgtactacacctttgccaacatggccatgttgaaccacctgcgcaggcagaggggcttccacacgtttgtgctgaggccacactgtggggaggctgggcccatccaccacctggtgtcagccttcatgctggctgagaacatttcccacgggctccttctgcgcaaggcccccgtcctgcagtacctgtactacctggcccagatcggcatcgccatgtctccgctcagcaacaacagcctcttcctcagctatcaccggaatccgctaccggagtacctgtcccgcggcctcatggtctccctgtccactgatgatcccttgcagttccacttcaccaaggagccgctgatggaggagtacagcatcgccacccaggtgtggaagctcagctcctgcgatatgtgtgagctggcccgcaacagcgtgctcatgagcggcttctcgcacaaggtaaagagccactggctgggacccaactataccaaggaaggccctgaggggaatgacatccgccggaccaatgtgccagacatccgcgtgggctaccgctacgagaccctgtgccaggagctggcgctcatcacgcaggcagtccagagtgagatgctggagaccattccagaggaggcgggtatcaccatgagcccagggcctcaatgagcctggtccatgaagtgcccaccacatcgcagcacttttaccacgttttgtcctcagaccccgcccatgctgtgtggtctctgcatgtctccattcttctctgtctctgtcttgcatgtctcctaccatgtcactgtccctgggccacccagtgaaagcaaagcctgggaatctgctcattgttgtttgggctcaggtattgagcctgatggcccaggtattgagggcctcccctgctggtggccctgtcctgggatcctcagaagcctgactgtcctatgggcttctccagtgtccacaggggcttgggatggttgtggggggctggcccctctagcctttccggtccttcctgggcaaatctaagccttggccagggccgaagtttaggcccctgtcttgttcatgtagccgaggggcaggcgggggacctctacacctctgctgtgggcacggggctgctgagggtctgtggaactccagcagctctgcactgggtagagctgggcctagagctcagtcacaggcctgggcttcctggcctgagtgggtagacgcaggcggcagaggtgctggaccacatctccgccaagtcactgcccagcagccttctccgtcctgtccccagcccacgtgctccttgggtgtcagcttcctgtgcctctgtgggagaggcagctgccttgtgttatgtctggggccacagttgctgcaaagtcctggatctgccactcaaccccgggagtggtgttcccagtgtggctcccagagctttgaccagattgtgatcccagctggcccctatgttgtgttctggactgaggcctttgctgtgaactgcagtgtttcatacgaaccatctttcctagtgcatgagaaataaagattatttaagtaatgaggcaggtggggtttctgttgggagagggaacgccgtggtgggaggtggctgtggatggaggcaccgtgcattctgagggg

SEQ ID NO: 336 - protein, 879 aa, Human
MRNRGQGLFRLRSRCFLHQSLPLGAGRRKGLDVAEPGPSRCRSDSPAVAAVVPAMASYPSGSGKPKAKYPFKKRASLQASTAAPEARGGLGAPPLQSARSLPGPAPCLKHFPLDLRTSMDGKCKEIAEELFTRSLAESELRSAPYEFPEESPIEQLEERRQRLERQISQDVKLEPDILLRAKQDFLKTDSDSDLQLYKEQGEGQGDRSLRERDVLEREFQRVTISGEEKCGVPFTDLLDAAKSVVRALFIREKYMALSLQSFCPTTRRYLQQLAEKPLETRTYEQGPDTPVSADAPVHPPALEQHPYEHCEPSTMPGDLGLGLRMVRGVVHVYTRREPDEHCSEVELPYPDLQEFVADVNVLMALIINGPIKSFCYRRLQYLSSKFQMHVLLNEMKELAAQKKVPHRDFYNIRKVDTHIHASSCMNQKHLLRFIKRAMKRHLEEIVHVEQGREQTLREVFESMNLTAYDLSVDTLDVHADRNTFHRFDKFNAKYNPIGESVLREIFIKTDNRVSGKYFAHIIKEVMSDLEESKYQNAELRLSIYGRSRDEWDKLARWAVMHRVHSPNVRWLVQVPRLFDVYRTKGQLANFQEMLENIFLPLFEATVHPASHPELHLFLEHVDGFDSVDDESKPENHVFNLESPLPEAWVEEDNPPYAYYLYYTFANMAMLNHLRRQRGFHTFVLRPHCGEAGPIHHLVSAFMLAENISHGLLLRKAPVLQYLYYLAQIGIAMSPLSNNSLFLSYHRNPLPEYLSRGLMVSLSTDDPLQFHFTKEPLMEEYSIATQVWKLSSCDMCELARNSVLMSGFSHKVKSHWLGPNYTKEGPEGNDIRRTNVPDIRVGYRYETLCQELALITQAVQSEMLETIPEEAGITMSPGPQ

SEQ ID NO: 337 - DNA, 3407 bp, Human
gaagaactggaactggtctggccatagggggaagcggcgcgttaaatccgccccctctccataccctactttcaaggggtgggcggtagaggggaggttggggttggagcagcggcgagggggcccctcccttgcacctccccccaccggacttggtcgcgcccgaagtgtaacactttctctttgtcggaggagctcctctgtttcctgtgcagtagctcccgttgcggcggcacccgtggcagccctggcggacgcaggagcgatggcagcgaccgatatagctcgccaggtgggtgaaggttgccgaactgtccccctggctggacatgtggggtttgacagcttgcctgaccagctggtgaataagtccgtcagccagggcttctgcttcaacatcctgtgcgtgggagagacaggtttgggcaagtccaccctcatggacaccctgttcaacaccaaattcgaaggggagccagccacccacacacagccgggtgtccagctccagtctaatacctatgacctccaagagagcaacgtgaggctaaagctcacgatcgttagcacagttggctttggggaccagatcaacaaagaggacagctacaagcctatcgtggaattcatcgatgcacaattcgaggcctacctgcaggaagagctaaagatccgaagagtgctacacacctaccatgactcccgaatccatgtctgcttgtatttcattgcccccacgggtcattccctgaagtctctggacctagtgactatgaagaagctggacagtaaggtgaacatcatccccatcattgccaaagcagatgccatttcgaagagtgagctaacaaagttcaaaatcaaaatcaccagcgagcttgtcagcaacggagtccagatctatcagtttcctacagatgatgagtcggtggcagagatcaatggaaccatgaacgcccacctgccgtttgctgtcattggcagcacagaagaactgaagataggcaacaagatgatgagggcgcggcagtatccttggggcactgtgcaggttgaaaacgaggcccactgcgactttgtgaagctgcgggagatgctgattcgggtcaacatggaggatctgcgggagcagacccacacccggcactatgagctgtatcgccgctgtaagctggaggagatgggcttcaaggacaccgaccctgacagcaaacccttcagtttacaggagacatatgaggccaaaaggaacgagttcctaggggaactccagaaaaaagaagaggagatgagacagatgttcgtccagcgagtcaaagagaaagaagcggagctcaaagaggcagagaaagagctgcacgagaagtttgaccgtctgaagaaactgcaccaggacgagaagaagaaactggaggataagaagaaatccctggatgatgaagtgaatgctttcaagcaaagaaagacggcggctgagctgctccagtcccagggctcccaggctggaggctcacagactctgaagagagacaaagagaagaaaaataatccatggctgtgtactgaatagtattccccgctacagctggactggactccatttagccttttaagccgaggttcctattttaactgacagctttcctttggggtgccaggcagcgaggccccccacccctatcctgccatgtacttcaagctcacttcttctttttgagttccgcaacttgctcctgcctcccagccccactggcactgaccatgaccacctacttctattttttttttagagtttctttttttgatcacttactttcaaagcacacagtcaaacaaggttatgccaaatttccaggcctttttgaagtattgagaaggggaaggggatttctcacttcaattatagatcataataggaagcaaaaagaaaaaaatgaaaagcaaacatatgcacgcacttttcttgttgacaaagcaagaatataggtttgctgtgtaggtttggtgctctattgattggtgagtgaccagagcaagtatgaaggtgatgctgccaaagcacaagccagtttcttgggaaaattcaagttacagtggagtatttttttgaagaccatatgcttggaggtagaaacaaaccaacgaccaaaaaaaaaaaaaaaaaaatctgctcagatactcagccagtagctcagagagatgctgagttaggcctgtcaggtctccttgggaaaggcttcatatttgcaactttgatgattctatgtccagcttcagagctgctttcccagaaattcacgcttaaacaaccaaccggtaaccaccacttccccacaccgccgccctggtaattatttgcattacaaaccggaggcgccctcatttgcatttgtgtacagattaactagttaaggcttgagaagctctgaataattcaaaagtattagacccacacagccttggagagaccttcagaaactaaggaggagttttatattaagggagacattttagtcagtaagacgatataacctacttactccgtaaggggaaatgaaggcccagagaagggaagggacttgaccgaggtcccacttctgtttcgaggcagaagccagactaattttcatgcctcctgactcccaatcagtttcacaaagggattcaatctgtttatatacgttacattcctggatacgaggtcttttgatgttcagagtaactgactagttagtattagaagaccctcgaggtttttttccacagaaaaacatctgaagatggattgggtgagggctggcaaaacgaaggcatgccgggccagctccttaacccaatgacccagtgatgctgcaaggctggaacggggtccaggagactgtgtgtaacaggtgccctaggtgacccttataatcagggaagtttggtgaacaaaaatcgaacccatgagtgaacataaattaaaaagttgatcaacctattaaaatgtgtatttcattgggtagcttttctcactgtagacagattttttccttcttcaatgaaaaggcttttaaattagtacaactgttactatttaaaaaaaaaataccctaagtactctgtttacttctggtgaaacaaaaccagtcattagaaatggtctgtgcttttattttcccagactggagtggcttttctgaaacacacacacacacacacacacacacacacacacacacacacacacacacgtacacacatccctcacttctcttaagccaagaagtttgctttccctagctgcagtgtagatggctcttgtttttgtttttttgttttaatcatttggcattcacatgtggctgttaatatgtgcttgtttttaattaaaacaagaagctttaaaaaaaaaaaaaaaaaaaaaa

SEQ ID NO: 338 - protein, 434 aa, Human
MAATDIARQVGEGCRTVPLAGHVGFDSLPDQLVNKSVSQGFCFNILCVGETGLGKSTLMDTLFNTKFEGEPATHTQPGVQLQSNTYDLQESNVRLKLTIVSTVGFGDQINKEDSYKPIVEFIDAQFEAYLQEELKIRRVLHTYHDSRIHVCLYFIAPTGHSLKSLDLVTMKKLDSKVNIIPIIAKADAISKSELTKFKIKITSELVSNGVQIYQFPTDDESVAEINGTMNAHLPFAVIGSTEELKIGNKMMRARQYPWGTVQVENEAHCDFVKLREMLIRVNMEDLREQTHTRHYELYRRCKLEEMGFKDTDPDSKPFSLQETYEAKRNEFLGELQKKEEEMRQMFVQRVKEKEAELKEAEKELHEKFDRLKKLHQDEKKKLEDKKKSLDDEVNAFKQRKTAAELLQSQGSQAGGSQTLKRDKEKKNNPWLCTE

SEQ ID NO: 339 - DNA, 3499 bp, Human
gccaagaagcttgagagaagaaaaatttcagaaaaattgtctcaatttgactagaatatcaatgaaccaggaaaactgaagcaccttccctaaagaaaacttgggtatacaattactccacagacagagctgagggttttttacccaaatcagtcactggattttgctgcctgatacgtgaatcttcttggaatttttctcatgtggatctaaggggaatgctttattatggctgctgttgtccaacagaacgacctagtatttgaatttgctagtaacgtcatggaggatgaacgacagcttggtgatccagctatttttcctgccgtaattgtggaacatgttcctggtgctgatattctcaatagttatgccggtctagcctgtgtggaagagcccaatgacatgattactgagagttcactggatgttgctgaagaagaaatcatagacgatgatgatgatgacatcacccttacagttgaagcttcttgtcatgacggggatgaaacaattgaaactattgaggctgctgaggcactcctcaatatggattcccctggccctatgctggatgaaaaacgaataaataataatatatttagttcacctgaagatgacatggttgttgccccagtcacccatgtgtccgtcacattagatgggattcctgaagtgatggaaacacagcaggtgcaagaaaaatatgcagactcaccgggagcctcatcaccagaacagcctaagaggaaaaaaggaagaaaaactaaaccaccacgaccagattccccagccactacgccaaatatatctgtgaagaagaaaaacaaagatggaaagggaaacacaatttatctttgggagtttttactggcactgctccaggacaaggctacttgtcctaaatacatcaagtggacccagcgagagaaaggcatttttaaattggtggattctaaagcagtgtccaggttgtgggggaagcacaaaaacaaacctgatatgaattatgagaccatgggaagagcactcaggtactattaccaaaggggtattctggcaaaagtggaaggtcagcgcttggtgtatcagtttaaagaaatgccaaaagatcttatatatataaatgatgaggatccaagttccagcatagagtcttcagatccatcactatcttcatcagccacttcaaataggaatcaaaccagccggtcgagagtatcttcaagtccaggggtaaaaggaggagccactacagttctaaaaccagggaattctaaagctgcaaaacccaaagatcctgtggaagttgcacaaccatcagaagttttgaggacagtgcagcccacgcagtctccatatcctacccagctcttccggactgttcatgtagtacagccagtacaggctgtcccagagggagaagcagctagaaccagtaccatgcaggatgaaacattaaattcttccgttcagagtattaggactatacaggctccaacccaagttccagtggttgtgtctcctaggaatcagcagttgcatacagtaacactccaaacagtgccactcacaacagttatagccagcacagatccatcagcaggtactggatctcagaagtttattttacaagccattccatcatcacagcccatgacagtactgaaagaaaatgtcatgctgcagtcacaaaaggcgggctctcctccttcaattgtcttgggccctgcccaggttcagcaggtccttactagcaatgttcagaccatttgcaatggaaccgtcagtgtggcttcctctccatccttcagtgctactgcacctgtggtgaccttttctcctcgcagttcacagctggttgctcacccacctggcactgtaatcacttcagttatcaaaactcaagaaacaaaaactcttacacaggaagtagagaaaaaggaatctgaagatcatttgaaagagaacactgagaaaacggagcagcagccacagccttatgtgatggtagtgtccagttccaatggatttacttctcaggtagctatgaaacaaaacgaactgctggaacccaactctttttagttaatataccaaagcttatgaataattgtttgttaattgaacattttcaattatatgcagactgactgattctaagataaattctaaggaggtttctaattttgtaattgttaaaaatagagttaattttgactttgttagatgagggaggaaaactcaactgtttctctttgttatctaaatgtttcagaattcaatcgtgaaggaacaggcattttacactatgaagacattcttttgagatttttatttcagttgctatatcataagcatttttaaagtttcttttctaattttacattgtattagattttctgattcttttgtaaatacagaacttaaatagaaggcaacaggaaatttatataggaactattttcattccacttgtgtaagttaagtcttgactctttcaaatgcaaaaaacctattttatgctttgttaaaattatggtgtcacttagattgactttagttgactgcactatataatatagaactatgaatatgtagaataacatgaaaaattggaggtgctggtggtatggctgaccctgtttcagaagcaggatagtataaaagcatcagcctaagaatggcactcccactaactagctatgtaatcttgacctctttgggctttagttcctctcataaaaggaagagatgtattggattagactagattatcaccactttctcttctagttctaatttttttaattctaatacctatattttcaagttatgtcaattaaatcattatcaggttatttcctaatgtaagaatagctaaaatgttgcagagaaataagtgacccaacaaaatttattcatctgttatgggtaagatctgccataaattcttcctaaataatttgtttactaactctttaggccactgtgctttgcggtccattagtaaacttgtgttgctaagtgctaaacagaatactgctattttgagagagtcaagactctttcttaagggccaagaaagcaacttgagccttgggctaatctggctgagtagtcagttataaaagcataattgctttatattttggatcattttttactgggggcggacttggggggggttgcatacaaagataacatatatatccaactttctgaaatgaaatgtttttagattactttttcaactgtaaataatgtacatttaatgtcacaagaaaaaaatgtcttctgcaaattttctagtataacagaaatttttgtagatgaaaaaaatcattatgtttagaggtctaatgctatgttttcatattacagagtgaatttgtatttaaacaaaaatttaaattttggaatcctctaaacatttttgtatctttaattggtttattattaaataaatcatataaaaattctcaaaaaaaaaaaaaaa

SEQ ID NO: 340 - DNA, 7239 bp, Human
cactagaatgtgaaggatcttcgcggttctgggtgcccagaaaggcggcgacgcggcggatgacaacattaggccgcgacgcgctcctggccaggcggcggctgtagtgttagctttggacgccgcagtagccgctgccggtagcaagccgactgagggaaggtgggggtccgcccgggctggtggacctcggggccgaaagttcccgccccgctcgggggctgagccggcagtgcctccgcggccgctgggcagcgcccttcgtccaggctcgcgccccagctgccgccgacgacagcggccgagagaagttggggtctgactagacgcttacggggcctcggaccccggcgccgcggcgacctcggaggaaccggctccttgcgtcccgcctccctgggagctccgcacgggatttgcagatttacagaatggctgcacattaatggaaagagaagcataaacctatcttctttcattatggagggaggtttggcagatggagaacctgatcgaacttcgcttcttggtgatagcaaagatgtccttgggccatcaactgttgtagcaaacagtgacgaatctcagcttctgacaccaggaaagatgagtcagcgccaaggaaaagaagcttatccaacgccaaccaaagatttgcatcagccatctcttagtccagcaagtcctcatagccagggttttgaaagagggaaggaagatatttctcaaaataaagatgaatcttcactttctatgtcaaagagcaagtctgaatctaaactttataatggctcagagaaggacagttcaacttcaagcaaactcacaaaaaaagaatctcttaaggtacaaaagaaaaattaccgagaagaaaagaaaagagccacaaaggagctgctcagtacaatcacagatccttctgttattgttatggctgattggttaaagattcgtggtactctaaagagctggaccaagttatggtgtgtgttgaaacctggggtgctactgatctataaaacccaaaaaaatggtcagtgggtaggaacagttcttctgaatgcctgtgaaatcattgaacgtccatcaaaaaaggatggcttttgtttcaaacttttccatcctttggagcaatctatttgggcagtgaagggtccaaaaggtgaagcggttggatccattactcaacccttacctagcagttatttgatcatccgagctacttcagagtcagatggaaggtgctggatggatgctttggagttggctttgaaatgttctagtcttcttaaacgtacaatgatcagagaaggaaaggaacatgacctgagcgtttcatcagatagcacacatgtgactttctatggcttactacgtgctaacaatctccacagtggtgataacttccagttaaatgatagtgaaattgaacgacaacattttaaggaccaagatatgtattctgataaatctgataaagaaaatgatcaagaacatgatgagtctgataatgaggtgatggggaaaagtgaagaaagtgacacagatacatcagaaagacaagatgactcatatatcgaacctgagcctgttgagcctttaaaggagactacctacactgaacagagccatgaagaacttggagaggcaggtgaggcttctcaaacagaaactgtatctgaagaaaacaaaagccttatctggacactattgaaacaagtccgtcctggcatggacctatccaaggtggttctgcctacatttattttggaaccccgttctttcctggataaactttcagattactactatcatgcagatttcctatctgaggcagctcttgaagaaaatccttatttccgtttgaagaaagtagtgaaatggtatttgtcaggattctataaaaagccaaagggactgaagaaaccttataatcctatacttggcgagactttccgttgtttatggattcatcccagaacaaacagcaaaactttttatattgctgaacaggtgtcccatcatccaccaatatctgccttttatgttagtaatcgaaaagatggattttgccttagcggtagtatcctggctaagtctaagttttatggaaactcattatctgcaatattagagggagaagcacggttaactttcttgaatagaggtgaagattatgtaatgacaatgccatacgctcattgtaaaggaattctttatggtacaatgacactggagcttggtggaacagtcaatattacatgtcaaaaaactggatacagtgcaatacttgaatttaaactaaagccattcctagggagtagtgactgtgttaatcaaatatcagggaaacttaaactgggaaaagaagtcctagctactttggaaggtcattgggatagtgaagtttttattactgataaaaagactgataattcagaggttttctggaatccaacacctgacattaagcaatggagattaataaggcacactgtaaaatttgaagaacagggagattttgaatcagagaaactctggcaacgggtaactcgagccataaatgccaaagaccaaactgaagctacccaagagaagtatgttttggaagaagctcaaagacaagctgccagggatcggaaaacaaaaaatgaagagtggtcttgcaaattatttgaacttgatccactcacaggagaatggcattacaagtttgcagatacccgaccatgggacccacttaatgatatgatacagtttgaaaaagatggtgttattcagaccaaagtgaaacatcgtactccaatggttagcgtccccaaaatgaaacataagccaaccaggcaacagaagaaagtagcaaaaggctattcctccccagaacctgacattcaagactcctctggaagtgaagctcaatcagtaaaaccaagtacaagaagaaagaaaggaatagaactgggagacattcagagttccatcgaatctataaaacaaacacaggaagaaattaaaagaaatattatggctcttcgaaatcatttagtttcaagcacaccggccacggattattttctgcaacaaaaagactacttcatcattttcctcctgattttgcttcaagtcataataaacttcatgttcaagtagaagttctctaccattgaatcagtgaactagaaagatctgatttggcctgggaccagtgttcaagttggtttggtctttattaaaaatcacaatattccgaaaacaaaaaaacctaggagataaatgtagaggtattgacttttcgtatcttttatcttcacactgaaacaagagctatcctatttgattattaaagtgagctatgtgttaagtgccaggacatttctagcttttgtgagaatgtgtctacatatgagtataataaacccacatgtatacacaattgtctcttatgtactcctacctgacagtagtctttgtattctatagtatgttctgagatataatgttaacattgttcataacaaaaaatgctatcaatcttataaatatatgtaatctattttcttcataaaacaggcacaaaagttttatcagtaaggaattacagattgagaaatgatggaataatagacataattaattcaatacactactgttaaaatcatttgcaaagcactcagctcaattatcttcttagaaagaaagaaaaagtatgaatggtcaaaatgaatacatcgagagagataaatggcaaattgcttttttaaaagtttacataagttttttttaacccctagaatttaatatttgtagatgcaggtaaatatatatacttacgtgtatatcagtataaaaacactggtgtgcaattaattggattgattataataccaccttaagcacttgctgaaaaaagtgtggtcaaaattgattgctgtccttttgtcttatttttgtttttcttaagtcagctggttcataacataggccaaattctagagatgtttatagagcatttgaagtgctgataatttatgttttttcattatgaaaacttattttagctttagactccagtgtgttcagtgaataagtagaatataaaaaaatataaccagtattttacttcaaaagccaaaaagaggcaataagaaaagacactttgtggtggcctttatgtgtgcattaaaattggtttctgtaaaacgtgtaataagttgagtatctacgaagagtatcaagttctgaagtttaatttttttattatcctcctctcttcttagtaacttctttctgtggcaaaaccacaattctttaagattcctattgttcaggctaaggcaaatttttttgtttgtttcttcagtttaatattttgattttgtgtttttacgtaaatatttatattccttgaaagcaatttttgccaaggtagttcagtttaggaatatgttgttctaaaatatgtcttagaatcctgaaagcatagattttgaaatgtttttttaatgaaaatgaaggtcagagagaataattgccctgaccacatttgcctttcagtaggaggaggctgtgaaatagtaaaattataatcgtttatgccatgataaatacaagattggtaaataaatacattgattggtaaattatgagaatcaaaatgataaaaagagcctgcttttttccctaaccaatatagctatcttaagtatccttaggtttctgtgaagaaccatttcccatgttttcttggcaaaataatgctgtattccatatgtacatgtgaaatgatgttttaaattgataaaagcttaaataagatctacctatacccagtattttcatgatattagaacaaatgggtttttggttatattttatatttgtcaatataatttttgtattcacattctgttacactctgcctattcattgatatatgatattctgtaaatattgtacaatttgatcttttttatggtttaaattagttaattacatacaaattgattggcttatcacaaaaatcatttcatcagtaaaccttgttaacattttgtactggtgacccacctcttaggactttggtcttatccacgtgtatgttgttttcatttggtccaaataatattttatttgtatgggtatcttctaagactaaataggtagttgtgttctttatttttaaaatttctttttagagcaaatgttatgggttcttacccaaagagtcaaaaactatttcttaagaaagagcagagttattcatgactgttctttatacactaaaagcatgcatctaatctaatagtcctcttattatgcttttagttgtatgagtctctttctatgaactgaacacaaaactcaggaattggtggcttaattttagatcagtgcttgtactaggcttagttatatgaatctttataacacataattactaactttgtagccatatatgtaattgactttgaatgttatttacctgaaattaatcttccttcacacatggaccgtaaacggttcccagttgtctgagagcctcatgagggtttctaggatttatgaccttatgaccagtttttttcatttaccaagattttattttcctacatgaaaatttaattgagtaataattattcacatgtgcattttctttttagctgttaaatgtactatgccatcatccaccatttagtaaaatgtagctggcccaggacatgtaaaaaaaaaaaaaaaacaacaacaataaatagggcatgtgaaatgttaagttacagcaatagatattttatttgtatttcatgttagtacttttttgttttatatcacttataaaggtacagtgtactctttgtcacagctcagttggtaaccgcattccattgaaaagttggccttgtaaaatacaactctcatttaatattcatgcttttgtgcctttaagaaaatattttttgtcattttttgtgttacagaactataatgtgattcaaggtgtttataggcttgtcataaaagggtcatttctgtgtgttactttctttttatatagctatagtatatttaaacaataatactatcttttataggggtttgtctatttacctattctttactcagacattgatgtagacttgtcagattattctgagtattgttaacagtgccttttcgatggaatcacactttttggctgtcaccttgtgccatatacacacaaaattttgtggaaggcagttttaactttctgaagaatatctgtcaaaatttaagaaaacaaatgtataaaattccattttttccagtgtttagcatttctagtaagcagtgaggttgtttgacatacagtgatgatggcattattgataagccatacatgagactgcagattatattgaatcatattaaatgtacagaaataaaatattagatttatatcaaattttccaatttgaaccagtggggaaaatcccacagaaatcagtaagtttacatttcaatttctatcttatttgactaagtggaaagagattctttaaaatgtataacctgccattatgtaatttggtttcattttattctacctgttgtgtgagtttagtatatttaatttactttttgttactctttacatactgtttatttttgttagtttttaattgaagatggactgttgaaattgtataggaccagtgtcttattaatatgattaatatatttagaagagccacgtgaaacccatgacaaaatgaatgtgaatattctttctaaaaatttagaaaatgttatctttttgcatttattatgtaaaactgttttacagtatcaaaatttttcacttaaagaaaaaaaatgccatgaaacatttgaactgatgagccacagaacttcagttgaaatttttttcactttttagcatgctaaatatacatctgagtttaaatgttctgtttaatggccattcataaattcaagcactaccactggtcagttttgtgtgatagaataaaaatatgttacctgcagtgtaagtacagcacactgtcaaattcttttccttaaggtgcacagtaaatgtacagatagttataggccactgttttgtaatgtagtacatttctaatctattattcctaacctattataactgtttgcagaaagaaaagaatttttctaataatctgtaaaattatgctaacttctacaagtaggcttctaaataaaatttttaaaaagagc

SEQ ID NO: 341 - protein, 889 aa, Human
MEGGLADGEPDRTSLLGDSKDVLGPSTVVANSDESQLLTPGKMSQRQGKEAYPTPTKDLHQPSLSPASPHSQGFERGKEDISQNKDESSLSMSKSKSESKLYNGSEKDSSTSSKLTKKESLKVQKKNYREEKKRATKELLSTITDPSVIVMADWLKIRGTLKSWTKLWCVLKPGVLLIYKTQKNGQWVGTVLLNACEIIERPSKKDGFCFKLFHPLEQSIWAVKGPKGEAVGSITQPLPSSYLIIRATSESDGRCWMDALELALKCSSLLKRTMIREGKEHDLSVSSDSTHVTFYGLLRANNLHSGDNFQLNDSEIERQHFKDQDMYSDKSDKENDQEHDESDNEVMGKSEESDTDTSERQDDSYIEPEPVEPLKETTYTEQSHEELGEAGEASQTETVSEENKSLIWTLLKQVRPGMDLSKVVLPTFILEPRSFLDKLSDYYYHADFLSEAALEENPYFRLKKVVKWYLSGFYKKPKGLKKPYNPILGETFRCLWIHPRTNSKTFYIAEQVSHHPPISAFYVSNRKDGFCLSGSILAKSKFYGNSLSAILEGEARLTFLNRGEDYVMTMPYAHCKGILYGTMTLELGGTVNITCQKTGYSAILEFKLKPFLGSSDCVNQISGKLKLGKEVLATLEGHWDSEVFITDKKTDNSEVFWNPTPDIKQWRLIRHTVKFEEQGDFESEKLWQRVTRAINAKDQTEATQEKYVLEEAQRQAARDRKTKNEEWSCKLFELDPLTGEWHYKFADTRPWDPLNDMIQFEKDGVIQTKVKHRTPMVSVPKMKHKPTRQQKKVAKGYSSPEPDIQDSSGSEAQSVKPSTRRKKGIELGDIQSSIESIKQTQEEIKRNIMALRNHLVSSTPATDYFLQQKDYFIIFLLILLQVIINFMFK

SEQ ID NO: 342 - DNA, 4309 bp, Human
tagttcaagacaacagagacaaagctaagatgaggaagttctgtacagtttaggaaatagaggctttcaaagataattcgcagtgatgtgaaactggcctcccaagccctgataacaacatggccaacgccctggccagcgccacttgcgagcgctgcaagggcggctttgcgcccgctgagaagatcgtgaacagtaatggggagctgtaccatgagcagtgtttcgtgtgcgctcagtgcttccagcagttcccagaaggactcttctatgagtttgaaggaagaaagtactgtgaacatgactttcagatgctctttgccccttgctgtcatcagtgtggtgaattcatcattggccgagttatcaaagccatgaataacagctggcatccggagtgcttccgctgtgacctctgccaggaagttctggcagatatcgggtttgtcaagaatgctgggagacacctgtgtcgcccctgtcataatcgtgagaaagccagaggccttgggaaatacatctgccagaaatgccatgctatcatcgatgagcagcctctgatattcaagaacgacccctaccatccagaccatttcaactgcgccaactgcgggaaggagctgactgccgatgcacgggagctgaaaggggagctatactgcctcccatgccatgataaaatgggggtccccatctgtggtgcttgccgacggcccatcgaagggcgcgtggtgaacgctatgggcaagcagtggcatgtggagcattttgtttgtgccaagtgtgagaaaccctttcttggacatcgccattatgagaggaaaggcctggcatattgtgaaactcactataaccagctatttggtgatgtttgcttccactgcaatcgtgttatagaaggtgatgtggtctctgctcttaataaggcctggtgcgtgaactgctttgcctgttctacctgcaacactaaattaacactcaagaataagtttgtggagtttgacatgaagccagtctgtaagaagtgctatgagaaatttccattggagctgaagaaaagacttaagaaactagctgagaccttaggaaggaaataagttcctttattttttcttttctatgcaagataagagattaccaacattacttgtcttgatctacccatatttaaagctatatctcaaagcagttgagagaagaggacctatatgaatggttttatgtcatttttttaattaaaaaagaaaaattcatataatcgtgtttaaaacacaaatgaagtcagtatttgcctttgttaacccttatccatttgttgacatgtagactgtttacaaaaaaaaaacacatggttaaatgttaaattttaattaaggcccccaaaaattaaatataactttttaaaatgaaaggagtcaccttttacatgactcaggtgaaaaaacagtataaacattaatttactttgtgttcaaaagaaaattccaactgctgttggggaaggacacagaaaagaaaaataaccacccaagaaaaacaaaaacaagaaaaacaaatcttatacaatcttagtatatttatcaaactagtagctagaaagtgaatatgcacattactaagacaaaaaacaagtgtaattcagaactacttgattttttttagttaaatgcaataattattatgcttagttttataacctgctctccttgtgaattcttccttcaaatgattacttaacgcagtagtaatagctagctgtaggatgtcctttaaatttttgtgcaaaaaaaaatttataccaggtatttggaaatatactttacaatattggaaaatgaagtatttttaatgtattacagcaattatgtttctaagcttaatgttaagcatgtagtcttagaataggacatgaaattaaattgtatgtagcttggaatatattgcttcagaaaactgaatgtgtatgtcggtcatattgcctttataaccatgctaatatctatgctttatacatactcaaacttgccttgccttaaaaacatacatactacatacttaaatcaggaattctagccatctcacagaataccaactaaaactaagtgcattgagatctgagattggtaaacccagattcatttaccacagctgtaattaagtttttagaaactattctctttttggggaaatccattgaagttaatttctgttatcttattagaagaaaatgatgttgatatgtgtttcagattttccatttgaaatcttataattaatttgatttatttactgtaagtaggaggtataaatgacactcttaaattggaaggaggggtgttttagtgtctgttttaggtcaaaattagtgattctatttttatcaaaagttttatcctgaagtttcaggaccactcttccttaataaacttgttaatggaaagcgagctttatgaacatttaaaaatgttgctgctgctttgttgcttaaaaagaaagttgccaagagagacttcttagggaaaatatttgggttttttttccaaaaattgctgaaatattgttttgccatttttaaaaagtctcaggttattaccactctgccattaaatatttgtatgcctgcatttttaaaaattctgtgcatgtactttatggagtacattctatttttgttttcagataccctacaaccaattttttttagtaatcttttagaattgaaattatcataaatgatcgagaataatcatcacatagtttaagattgtatatgttgagtagtttaaaacaatctttgcattttacagtaagaatcaaagtcccttcagtgtgcctttgtcagctaatatgtgaccagcaatgacaaccttgggagtatttattaaatattatgctatgaatataggcaacacagaacagggtttgcagtatagcgtcttgatgctaaattctcatatacctctacacgagaaatatggaggagaaaaacaagcatttacatatattcttcgtcactttgaagatgcatggcctgaactcgactgcttgtgtttgtttacatatcaggcatacccaggcatctcctgcagccagaggttccattgctgtctttgctcagtcctcttttaaaatatgaattagtggacaggcacggtgcctcacacctgtaatcccagcactttgggaggtcgaggcaggtggatcacgaggtcaggagatcaagaccatcctggctaccactgaaaccccatctctactacaaaaaaattagccgggcgtggtggcgggcacctgcagtcccagctactcgggaggctgaggcaggagaatggtgggaacccgggaggcagagcttgcagtgagccaagatcacgccactgcactccagcctgggcaacagagcaagactctgtctcaaaaaaaataaataaataaattatgaatgagtattttctagaaattcaacttgctaagcctgtaatacttaagggtagtttatctagatacagtactttcttccctgataagtagtatcattggagcccttaggtataggagaagaggaagaagtttaaaaagtgtaagtgggccgggcgtggtggctcatgcctgtaatcccagcactttgggaggccgaggggggcggatcacgaggtcaggagatccagactatcctggctaacaaggtgaaaccccgtctctactaaaaatacaaaaaaaaacattagccaggcgtggtggcgggcgcttgtagtcccagctactcgggaggctgaggtaggagaatggcttgaacccaggaggcggagcttgcagtgagccgagattgcaccactgcactccagcctgggcgacagagcaagactccgtctcaaaaaaaaaaaaaaagtgtaagtggattaaaagagaaacttggtctagttcataatatttttaatagggctttccctggctgctggaaaacttaggccagtaagcatctctttgtttaaagtcctacaagacaatttgaaataattcattgttcatgccaaaattctaagtactgtttttcttagcaagtgtaacataatcaggaacaatgggtacaagtaaaacattctttggatgatattcaaagccttattagcactgcacctgaataataggtcattttgcctcactcatttgccaaagtagccatttctaagttaaggaagtttttagataggctcatagccttgtatttcgttttagattgtaagctcaatggcagggatactatattggtaattatgttttcatatagcaaccaccacagtatattctt

SEQ ID NO: 343 - protein, 325 aa, Human
MANALASATCERCKGGFAPAEKIVNSNGELYHEQCFVCAQCFQQFPEGLFYEFEGRKYCEHDFQMLFAPCCHQCGEFIIGRVIKAMNNSWHPECFRCDLCQEVLADIGFVKNAGRHLCRPCHNREKARGLGKYICQKCHAIIDEQPLIFKNDPYHPDHFNCANCGKELTADARELKGELYCLPCHDKMGVPICGACRRPIEGRVVNAMGKQWHVEHFVCAKCEKPFLGHRHYERKGLAYCETHYNQLFGDVCFHCNRVIEGDVVSALNKAWCVNCFACSTCNTKLTLKNKFVEFDMKPVCKKCYEKFPLELKKRLKKLAETLGRK

SEQ ID NO: 344 - DNA, 2521 bp, Human
ggccgggacggggcagggcgaacctgccagtgactggactcagcttctttgcgtaaccaatactggaaggcatttaaaggcacctctgccgccacagaccttgcagttaactccgccctgacccacccttcccgatgcagtccctgatgcaggctcccctcctgatcgccctgggcttgcttctcgcggcccctgcgcaagcccacctgaaaaagccatcccagctcagtagcttttcctgggataactgtgatgaagggaaggaccctgcggtgatcagaagcctgactctggagcctgaccccatcatcgttcctggaaatgtgaccctcagtgtcatgggcagcaccagtgtccccctgagttctcctctgaaggtggatttagttttggagaaggaggtggctggcctctggatcaagatcccatgcacagactacattggcagctgtacctttgaacacttctgtgatgtgcttgacatgttaattcctactggggagccctgcccagagcccctgcgtacctatgggcttccttgccactgtcccttcaaagaaggaacctactcactgcccaagagcgaattcgttgtgcctgacctggagctgcccagttggctcaccaccgggaactaccgcatagagagcgtcctgagcagcagtgggaagcgtctgggctgcatcaagatcgctgcctctctaaagggcatataacatggcatctgccacagcagaatggagcggtgtgaggaaggtcccttttcctctgttttgtgtttgccaaggccaaactcccactctctgcccccctttaatcccctttctacagtgagtccactaccctcactgaaaatcattttgtaccacttacattttaggctggggcaagcagccctgacctaagggagaatgagttggacagttcttgatagcccagggcatctgctgggctgaccacgttactcatccccgttaacattctctctaaagagcctcgttcatttccaaagcagttaaggaatgggaaccagagtgttttaggacctgaagaatctttatgactctctctctttcactcttttttttttttgtcactaagttaaaagcgaagtgagagtattaacgtttttgttctcctccggccccctgttacaatgaaggggcaaaagtatttgctcttagtctattcctcccttaacttctgtgactaatttttatttcctttctagatttgcccaattaatactagggtgcagtgtatcctggagaggtagggtgtgtgggggaggaatcccttgggggagatattaggagtgctctgttgtttacaaactcaggtacccgcagggcctagcaagagacttaaatgactgataagaaccgtgagaaacatgttgcttccaggcttgatttcgatttttcgctttttttttttttgagacagaatctcactttgtcaccaggctggagtgcagtggtgcaatctcacctcactgcaacctccgcctcctgggttcaagcaattctcctgcctcagcctcccaagtagcttggactacaggccctgccaccacgcccggctaatttgtgtatttttagtagagatggggtttcaccatgttggccaggatggtctcgatctcttgacctcgtgatctgtccaccttggccttgcaaagcgctggattacaggcatgagccactacacccagccgatttttcctttttgattaaagatgctattacaatgtaaatatttcttacacagaaagtcacagcacatgtgcccattgatacaaggctgctgaggcctggtctccagttggaaatataattaagggtggcaaggactggagtcagttggagagtgcatagccagtctgtgaagacaactgccagatactggcaatactccagcctggtgacagagtgagactctgtctcaaaaaaaaagtttcaatgtttactcctagagaagccaaaaatccagatttgtatatgaaatcttaccattttaaaagattggcagctaattatttttttaaaaagctgtgcagtgtgatgtgtcccaaacggactggctcatgggtggccacgtcacaacctctgatctcagaccgtgcatgccttgtcctcttaagacaactcctgtggcaccgtttctccctccacagggccaaagccatagtgtccggtcccaaggacaaggctcttccagtgctaggagaggtatgagcagcctctcacctgtgagctgtggggatcacaaggctgcctgcctcagtcttggagtcctgttgggtgaatgaggcagatgggaaagagcctcaccagcagctgcttttggagcaggggtccaaggaagagagggtggcctcgacatcaaactgcctggatttttctaccaccctgttacatcataacaacttctgaaacacacaccagccctgagttctgggctcatttgaagcctggaatagcaataaatctttttaacttgcggacagttaaaaaaaaaa

SEQ ID NO: 345 - DNA, 6830 bp, Human
ccacggtaaggggatgacgtagctttgccaaagacttagaagctaagcagaaaatgagcttaacatcctggtttttggtgagcagtggaggcactcgccacaggctgccacgagaaatgatttttgttggaagagatgactgtgagctcatgttgcagtctcgtagtgtggataagcaacacgctgtcatcaactatgatgcgtctacggatgagcatttagtgaaggatttgggcagcctcaatgggacttttgtgaatgatgtaaggattccggaacagacttatatcaccttgaaacttgaagataagctgagatttggatatgatacaaatcttttcactgtagtacaaggagaaatgagggtccctgaagaagctcttaagcatgagaagtttaccattcagcttcagttgtcccaaaaatcttcagaatcagaattatccaaatctgcaagtgccaaaagcatagattcaaaggtagcagacgctgctactgaagtgcagcacaaaactactgaagcactgaaatccgaggaaaaagccatggatatttctgctatgccccgtggtactccattatatgggcagccgtcatggtggggggatgatgaggtggatgaaaaaagagctttcaagacaaatggcaaacctgaagaaaaaaaccatgaagctggaacatcagggtgcagcatagatgccaagcaagttgaggaacaatctgcagctgcaaatgaagaagtactttttcctttctgtagggaaccaagttattttgaaatccctacaaaagaattccagcaaccatcacaaataacagaaagcactattcatgaaatcccaacaaaagacacgccaagttcccatataacaggtgcagggcatgcttcatttaccattgaatttgatgacagtaccccagggaaggtaactattagagaccatgtgacaaagtttacttctgatcagcgccacaagtccaagaagtcttctcctggaactcaagacttgctggggattcaaacaggaatgatggcacccgaaaacaaagttgctgactggctagcacaaaacaaccctcctcaaatgctatgggaaagaacagaagaggattctaaaagcattaaaagtgatgttccagtgtacttgaaaaggttgaaaggaaataaacatgatgatggtacgcaaagtgattcagagaacgctggggctcacaggcgctgtagcaaacgtgcaactcttgaggaacacttaagacgccaccattcagaacacaaaaagctacagaaggtccaggctactgaaaagcatcaagaccaagctgttactagctctgcgcatcacagaggggggcatggtgttccacatgggaaattgttaaaacagaaatcagaggagccatcggtgtcaatacccttcctacaaactgcattattaagaagttcagggagtcttgggcacagaccaagccaggagatggataaaatgttaaaaaatcaagcaacttctgctacttctgaaaaggataatgatgatgaccaaagtgacaagggtacttataccattgagttagagaatcccaacagtgaggaagtggaagcaagaaaaatgattgacaaggtgtttggagtagatgacaatcaggattataataggcctgttatcaacgaaaaacataaagatctaataaaagattgggctctcagttctgctgcagcagtaatggaagaaagaaaaccactgactacatctggatttcaccactcagaggaaggcacatcttcatctggaagcaaacgttgggtttcacagtgggctagtttggctgccaatcatacaaggcatgatcaagaagaaaggataatggaattttctgcacctcttcctttagagaatgagacagagatcagtgagtctggcatgacagtgagaagtactggctctgcaacttccttggctagccagggagagagaaggagacgaactcttccccagcttccaaatgaagaaaagtctcttgagagccacagagcaaaggttgtaacacagaggtcagagataggagaaaaacaagacacagaacttcaggagaaagaaacacctacacaggtataccagaaagataaacaagatgctgacagacccttgagtaaaatgaacagggcagtaaatggagagactctcaaaactggtggagataataaaaccctacttcacttaggcagctctgctcctggaaaagagaaaagtgaaactgataaggaaacttctttggtaaagcaaacattagcaaaacttcaacaacaagaacaaagggaggaggctcagtggacacctactaaattgtcttccaaaaatgtttcaggtcagacagataaatgtagggaggaaacttttaaacaagaatcacaacctccagaaaaaaattcaggacattctacaagcaaaggagacagagtggcacaaagtgagagcaagagaagaaaagctgaggaaattctgaaaagtcagactccaaagggaggagacaagaaggaatcctccaagtcattagtgcgacaagggagcttcactatagaaaaacccagcccaaacatacccatagaacttattccccatataaataaacagacttcctctactccttcttctttagcattaacatctgcaagtagaatacgagaaagaagtgagtctttggatcctgattctagtatggacacaacccttattctaaaagacacagaagcagtaatggcttttctagaagctaaactacgtgaagataataaaactgatgaaggaccagatactcccagttataatagagacaattctatttcaccagaatctgatgtagatacagctagtacaatcagtctggttactggagaaactgaaagaaagtcaacccaaaagcgaaagagtttcactagcctctataaagataggtgttccacaggttctccttccaaagatgttacaaaatcatcatcttcaggtgctagggaaaaaatggaaaagaaaacaaaaagtcgttccacagatgtgggttcaagagcagatggtcgtaaatttgttcagtccagtgggagaataagacagccctcagtagacttaacagatgatgaccaaacctctagtgtacctcattctgccatctctgatattatgtcatctgatcaagaaacttactcttgtaaacctcatggacggactccacttacctcagctgatgagcatgtacattccaaactggaaggaagtaaagtaacgaaatctaagacttctccggtggtatctggttcatctagtaaatcaaccacccttccaaggccacgacctaccaggacttccctcttgcgcagagcacgacttggtgaagcttcagacagtgaacttgctgatgctgacaaagcatctgttgcttctgaagtatccacaacaagttctacatcaaaacctcccacaggaaggcgtaacatctctcggattgatttattggctcagcctcgtagaacacgacttggctcactgtcagctcgtagtgactctgaagcaacaatttctagaagtagtgcctcttcgaggaccgcagaagccatcattagaagtggagccagactagtaccatcagataaattttctcctagaattagagctaacagtatctctcgactctcagactccaaggtcaaaagtatgacctcagctcatggctctgcttcagtaaattcaagatggaggcgctttcctactgattatgcttccacctcagaagatgaatttggatcaaaccgtaattcccctaaacatacccgtctacgtacttctccagccctgaaaaccactcgcttgcagagcgctggatcagcaatgcctactagttcttcattcaaacaccggattaaagagcaggaagactacatccgagattggactgctcatcgagaagagatagccaggatcagccaagatcttgctctcattgctcgggagatcaacgatgtagcaggagagatagattcagtgacttcatcaggcactgcccctagtaccacagtaagcactgctgccaccacccctggctctgccatagacactagagaagagttggttgatcgtgtttttgatgaaagcctcaacttccgaaagattcctccattagttcattccaaaacaccagaaggaaacaacggtcgatctggtgatccaagacctcaagcagcagagcctcccgatcacttaacaattacaaggcggagaacctggagcagggatgaagtcatgggagataatctgctgctgtcatccgtctttcagttctctaagaagataagacaatctatagataagacagctggaaagatcagaatattatttaaagacaaagatcggaattgggatgacatagaaagcaaattaagagccgaaagtgaagtccctattgtgaaaacctcaagcatggagatttcttctatcttacaggaactgaaaagagtagaaaagcagctgcaagcaatcaatgctatgattgatcctgatggaactttggaggctctgaacaacatgggatttcccagtgctatgttgccatctccaccgaaacagaagtccagccctgtgaataaccaccacagcccgggtcagacaccaacacttggccaaccagaagctagggctcttcatcctgctgctgtttcagccgcagctgaatttgagaatgctgaatctgaggctgatttcagtatacatttcaatagattcaaccccgatggggaagaggaagatgttacagtacaagaatgactttctcttgattgttgaaaaatcattacctgtggaatggctaggaatattggaagcagcatagtgttgatgtacgcaaaacaagacagcttggtcagctacaatcttggaatccctgtcttcttaattttatttatttatttttgacgtataatgtagtatatcaatcctttcaaactatttagataaccacttgatgcacaaataggaaaaagcagattgtggcagtgtcgccttttgtggttttatgattttcaaattgaatttaatgattacaccctttcccttcatagatcttttttcttttttttaagccatgctgtgacctacaagcaaactaaatagccaacatttctgaacccctaagtctcctgtgccaagctgctccctgaaatggacttcttcatctgtacagatttgttaaaccattctatttgcttcttaataataggatttatattagtactcattaccattggacacaatgacataagtactctccacagtaaagcagacctttcacaacagtcactctgtgtcctaaaattttccaacatagatgtgatttatataactttgttgatacgtaaattgtcttggggtttacggaaattaactattatgtttgcactaagatttgctgggagtggtaggtggacatatctatatatcaataaggactaaccgtcttttttgtacataggggattgataatactgtatttgttttaagcccacagtgtttttactccactttcaaaaagtcaatttgggcactttttttcatttttttttaatgggaataagatttggtctctcattttaggttaaatgataactagaaagattaaactagacagatagtttaggtggagtatatttttaaaactcagaacatgtatattggtcctgtgttaccaagtttatatgtgacagttgaaaaagaaattcccttgaaatgatcatgaggttaaaattttcttcattaggggacttggagaaccagtagtcgtaagattagttgatagtttcactcccaagcaatgaattgcttctgtgtgtttccctgtaggactcaatagtaaatgctgtctgtcttacacatttataaggaccctgcaagacgacgacaaaggcctttggcctgtgctactaaacaagaagcctatgaaaaatttcttctttaaacttgttttttctctttccagtaagttcacatttggataattttaaaaagaaaagtaattacctttgtgtttccagaacactataattggggtgtatcttaattcagttaaatattattagtagacctggattttcccccttgaccccatcagtctataaaggttaaactgcaacttttatgaaatggtctttaatatttccacaataatcctgtgctatatttgttttaagaaacaaagtaactctatacacttcaagactttacaggattttttaaatcctgtattgttggatcaattaataaagatgcaaaaaaactttatagagatgtaaaaacaaaactataatggatctcctatttttctttaaatacaaaaaaaaaaaggtaaatgaactattctccttgtaaagctaaattccccattctgtctaataaaggaagactgaaaaaaggttttaaagaacataaatggaaagatacaaatgctttgaaggaataaacgaaatgttaaaacagggtcaatccatttgaagaaaaagttggacaaaataatcagcattgctccctcttttatttaatatttgggtactgattatatccacatggaagtagaaggtaaggagtttaggaaaatactagaatctactctgcttacattcttgtttaagtgtttacacagtttggttcaattataaacatttggccttttactatgttatttttattttgtatgaatacattatcctccttatttatttttgttacatttattacttatgttattttgttatgcatttacaactccatttttaaataaagtgtttctggaacttt

SEQ ID NO: 346 - protein, 1584 aa, Human
MSLTSWFLVSSGGTRHRLPREMIFVGRDDCELMLQSRSVDKQHAVINYDASTDEHLVKDLGSLNGTFVNDVRIPEQTYITLKLEDKLRFGYDTNLFTVVQGEMRVPEEALKHEKFTIQLQLSQKSSESELSKSASAKSIDSKVADAATEVQHKTTEALKSEEKAMDISAMPRGTPLYGQPSWWGDDEVDEKRAFKTNGKPEEKNHEAGTSGCSIDAKQVEEQSAAANEEVLFPFCREPSYFEIPTKEFQQPSQITESTIHEIPTKDTPSSHITGAGHASFTIEFDDSTPGKVTIRDHVTKFTSDQRHKSKKSSPGTQDLLGIQTGMMAPENKVADWLAQNNPPQMLWERTEEDSKSIKSDVPVYLKRLKGNKHDDGTQSDSENAGAHRRCSKRATLEEHLRRHHSEHKKLQKVQATEKHQDQAVTSSAHHRGGHGVPHGKLLKQKSEEPSVSIPFLQTALLRSSGSLGHRPSQEMDKMLKNQATSATSEKDNDDDQSDKGTYTIELENPNSEEVEARKMIDKVFGVDDNQDYNRPVINEKHKDLIKDWALSSAAAVMEERKPLTTSGFHHSEEGTSSSGSKRWVSQWASLAANHTRHDQEERIMEFSAPLPLENETEISESGMTVRSTGSATSLASQGERRRRTLPQLPNEEKSLESHRAKVVTQRSEIGEKQDTELQEKETPTQVYQKDKQDADRPLSKMNRAVNGETLKTGGDNKTLLHLGSSAPGKEKSETDKETSLVKQTLAKLQQQEQREEAQWTPTKLSSKNVSGQTDKCREETFKQESQPPEKNSGHSTSKGDRVAQSESKRRKAEEILKSQTPKGGDKKESSKSLVRQGSFTIEKPSPNIPIELIPHINKQTSSTPSSLALTSASRIRERSESLDPDSSMDTTLILKDTEAVMAFLEAKLREDNKTDEGPDTPSYNRDNSISPESDVDTASTISLVTGETERKSTQKRKSFTSLYKDRCSTGSPSKDVTKSSSSGAREKMEKKTKSRSTDVGSRADGRKFVQSSGRIRQPSVDLTDDDQTSSVPHSAISDIMSSDQETYSCKPHGRTPLTSADEHVHSKLEGSKVTKSKTSPVVSGSSSKSTTLPRPRPTRTSLLRRARLGEASDSELADADKASVASEVSTTSSTSKPPTGRRNISRIDLLAQPRRTRLGSLSARSDSEATISRSSASSRTAEAIIRSGARLVPSDKFSPRIRANSISRLSDSKVKSMTSAHGSASVNSRWRRFPTDYASTSEDEFGSNRNSPKHTRLRTSPALKTTRLQSAGSAMPTSSSFKHRIKEQEDYIRDWTAHREEIARISQDLALIAREINDVAGEIDSVTSSGTAPSTTVSTAATTPGSAIDTREELVDRVFDESLNFRKIPPLVHSKTPEGNNGRSGDPRPQAAEPPDHLTITRRRTWSRDEVMGDNLLLSSVFQFSKKIRQSIDKTAGKIRILFKDKDRNWDDIESKLRAESEVPIVKTSSMEISSILQELKRVEKQLQAINAMIDPDGTLEALNNMGFPSAMLPSPPKQKSSPVNNHHSPGQTPTLGQPEARALHPAAVSAAAEFENAESEADFSIHFNRFNPDGEEEDVTVQE

SEQ ID NO: 347 - DNA, 5507 bp, Human
ggccaggttatcaggggcttcactgtgaaacctgcaaagagggcttttacctaaattacacttctgggctctgtcagccatgtgactgtagtccacatggagctctcagcataccgtgcaacagttctgggaaatgccagtgcaaagtgggtgtcattggctctatatgtgaccgatgccaagatggatattatggctttagtaagaatggctgcttgccctgccaatgcaataatcggtctgccagttgcgatgccctcacaggtgcttgtttaaactgccaggaaaatagcaaaggaaatcactgtgaagaatgtaaagaaggattttatcagagtcctgatgccactaaagaatgtcttcgctgcccttgttcagcagtgacatctacaggcagctgctctataaaatcgagtgaattggaacctgaatgtgaccagtgtaaagatggttacataggcccgaactgcaataaatgtgaaaatggctattacaattttgacagcatctgtagaaagtgccaatgtcacggccatgtggacccagttaaaactccaaagatttgtaagcccgagagtggtgagtgcatcaactgcctccataacaccactgggttttggtgtgagaactgcctagaaggttatgttcacgacctcgagggaaattgcatcaagaaagaagttattcttccaacacctgaaggttctaccattttggtttccaatgcctctttgaccacatcagtgcccacccctgttataaatagtacttttacccctacaaccctgcagactatcttttcagtaagcacttctgaaaacagcacttcagctttagctgatgtatcatggacccaatttaacatcatcattttgacagtcatcatcattgttgtggtgctgctaatgggatttgtgggggctgtatatatgtaccgcgagtaccaaaaccggaaactcaatgcccccttttggaccatcgagctgaaagaagacaatatcagtttcagcagctaccatgacagcattcccaatgcagatgtttcgggattgttggaagatgatggcaatgaagtggctcccaatgggcagctgaccctgacgacgcccatacataactacaaagcctaaggagctagaactgttctgaattgttaaaccacagtgcttgctaagacagagtcagcccctgggccagacaaagcctggctagagtttgctgagaaagcaaaggcaaatagtgcatctgaaattttcaggtacaaatttgtaatgcgcttagcctatctattgctcttagttttcccatgaagatctgaagcgttcactgtcattaggacttgaagtaaagtatatttttgtaccaaaccacatgggagtatggaaaggctgaaccccatagtgcagcccaaaaccactttgacctccagatagactcctggggaagcattcaccaagccagtggtaacaagatgatgaatgtggagggggaaaagactgctggaagacttcatctccattcctgaaacattttttttaaaacagtgtcagggattatattcgttttactatacaaaaggacatcattgaggaaaagcttgtttctaggctgtatcacagtaaataatcttgattgtttctagaacaggggtagaaaagtcccaagatcttcagaagggcttggttttttcctcccaggattcttgctcagtgatgagttgaaagcacaggataagcttctaagggaggaaggcagcattggggagcaggaggctgatggtcctcctcagggtctcagtgtaaatgataaattgtctaaaaataaggaatattcctgcctctagagaaataaggtgtacatagttaatgtagcatatctggtcgacgttgtatttgtatctatttgtaaaaaaaaaatcatgtcatattttatcatctggaatttatttgtacagcagttaatggtgttgtaaaaagaaaaatatggggattgcttaaaatactgtaaaatagatggcaatattgctagagctgggactctggtgagcatccgtcatttttagtccttcttgaggacattgctgaaatttataagaggtcgaatgtttctttctttcctttctcagtctaaaagtagagttatatgctctttgacttactatgattcaagcaatagattttgaagtcagtaatcgttaagctgggacataggatgcattctccaaaaacattaatctaattagacattagccaccctatatattttacatagattaatataaaacatatcctcattaaaaaatgtttttcttgaatgtaaaagatagtcttccaaaggatagaaatattttagttccaagagaaaagccatcatattacttgggatctgtagttttcatgcctatgaaatatttataatcctccctcaccccaaataaaaaatctcctacatgtgaacatagcctgtcactcatttgccatgaggtatgtgccatctccctgcagtgctatagttctcccattgtcttcctgtctggttaatgagcagctttgtagatgggtgtgtctagttagttcttgctttttgatggagttttttcctagaggccaactactgttgctctcgtttattatgatattgacattttgggttaagcaaggtgggtgggaaaggtggtcagatgttaaatataacttattaggaggaacagtgaactgtgaagtggttagaaaaaaaataaaaacttcttattagattagacctaggaaattcaagctgacccctttgcctaacttccctagagaaaaacctagaacttggtcatccctttataggagacccctaagttgttctcagggtttggagatgatgttctggagggagtacaagcaaataatctacttctggtaatctgagggtgctttgcgtatttggccattgctcagaagaatagaggttacattatattacattatatgaaaattatttagtttttctatagccctttgtagtttgcaaagcacttttccatatgtgtgtcctctcttccacaccatagccccctgaggaagtaattgttgtccccattttatagatgaaaaggctgaggcacagaggagctaaatatcttgttcaaggctatacaatgtgtgtgattattaggcttggaatcagggcctctaactctaaagcacatgttttttcaactatatgcagaaattgcctagccatggacacaagaaagctgggaggaagagttctacttgtggatgtttttaattttttttaaatatcaggagcaatccagggccatacagctatgaagcacttagtgaaaagaacacaagaagatttactaactgaagttagtattagtgattagaaaacaaaactgccagtttgtgcttcattaaggtgaactcatctctccaagcaggaagggaaaatttgctttccctagcagttgctgcatatgtgtgtacagactgcacaattctaagaaattgtgcaaaatggcatacctgtctttctcccagatacaccgccccctgccccccccaaaaaaggtcaggattaaaggtggtgagaagtgaacatttattaaacagaagttaaaccaatagagagaaaggaggtttgttggagtctaagaggattttgaccatgtagaaattccttgaaacagaccttaaaaggtattgaaaaattgaatcacaaagaaagtttacctttaaatacttgttaatggctcctagatcatggttataatttttctcaatgggaaaaaaagtcttaaaatttgttttaaataagatcctctaatgtctcgagctttttgattctggaaataatttgctttaaaatataaatcaatcagaaagtgatctaccactgaaatcattctaggaaactagcatgggatgcactgcacaatgttctttcctctaaaggcatgggccccataaactgtggcatctggcagcaggatgccatcagtcctttagaaagcctaattttgggccgggtgcggtggctcacgcctgtaatcccagcactttgggaggccgaggcgggtggatcacaaggtcaggagttcgagaccagcctggtcaacatggcgaaatcccgtctctactaaaaacacaaaaattagccgggtgtacgtgcctgtggtctcagctgcttgggaggctgaggcaggagaatcgcttgaacctgggaggcggaggttacagtgggccgagatggcgccatttcactccagcctgggcgacagagcaagactctgtctcaaaaaaaaggaagaaaaagaaagcctaatattgggagaatgtttgtgtaaggattggaaatctgtttatttttaaataagatagcactgatgtgaatcttgtttggaaattacagatactgccattaagcgatgcttttatcttcattaattcattttggtaagcgcctatgcatttctgatggttaggtgccctaggtagtgttaagtatgtccgtgtcctcccttactcccctctcgctccctctaccctctatcccctagggttcttttattaatggaatttctccagttatagagaaaaaaatgacatttgaaaactaaagctcatttatattaatactaaggtcctgtgggcctagtgcgttactcttcccagtgatacctagattttaagagtagagaacagaggaaacatgggatgagaggagagaggttttttagacaacatttgtagacacctcaaattatatcactgttctctagcgccaatattcccaggtaaattgaccattaaagcaatactcactgacctactagtttattttggtcagctgagtaccatcaggatatttaaccctttaagtgctgttttgggagtagaaaactaaagcaacaatacttcctcttgacagctttgattggaatggggttattagatcattcaccttggtcctacactttttaggatgcttggtgaacataacaccacttataatgaacatccctggttcctatattttgggctatgtgggtaggaattgttacttgttgctgcagcagcagccctagaaagtaagcccagggcttcagatctaagttagtccaaaagctaaatgatttaaagtcaagttgtaatgctaggcataagcactctataatacattaaattataggccgagcaattagggaatgtttctgaaacattaaacttgtatttatgtcactaaaattctaacacaaacttaaaaaatgtgtctcatacatatgctgtactaggcttcatcatgcatttctaaatttgtgtatgatttgaatatatgaaagaatttatacaagagtgttatttaaaattattaaaaataaatgtatataatttgtacctattgtagatttgttgtttacttttttgtgtggtcagagttgtttcatgtcttcaaatacatgccaaggatcatttactttcagcccacttcataaaaatctttgaactctt

SEQ ID NO: 348 - protein, 375 aa, Human
PGYQGLHCETCKEGFYLNYTSGLCQPCDCSPHGALSIPCNSSGKCQCKVGVIGSICDRCQDGYYGFSKNGCLPCQCNNRSASCDALTGACLNCQENSKGNHCEECKEGFYQSPDATKECLRCPCSAVTSTGSCSIKSSELEPECDQCKDGYIGPNCNKCENGYYNFDSICRKCQCHGHVDPVKTPKICKPESGECINCLHNTTGFWCENCLEGYVHDLEGNCIKKEVILPTPEGSTILVSNASLTTSVPTPVINSTFTPTTLQTIFSVSTSENSTSALADVSWTQFNIIILTVIIIVVVLLMGFVGAVYMYREYQNRKLNAPFWTIELKEDNISFSSYHDSIPNADVSGLLEDDGNEVAPNGQLTLTTPIHNYKA

SEQ ID NO: 349 - DNA, 4994 bp, Human
ccgcagcgctcggctggctgcagcggcaccgcgggttgcgcggccggggatgctccagcgggcgcgatggcccccgccatgcagccggccgagatccaatttgcccagcggctggcgtccagcgagaagggcatccgggaccgagcggtgaagaagctgcgccagtacatcagcgtgaagacgcagagggagacaggaggtttcagtcaggaagaacttctacaggaagagctcgccaacaccattgcacagctagtccatgctgttaacaactcagcggctcaacacctgttcattcagaccttttggcaaaccatgaatcgagaatggaaaggaatagacaggctacgcctggacaaatactatatgctgattcgtctggtcctgaggcagtcctttgaagtcttgaagcgaaatggctgggaagaaagccgaatcaaggttttcttggatgtcctgatgaaggaggtcctgtgtcctgagagtcagtctcctaatggagtgagattccacttcattgatatttacctggatgaactctccaaagtcggggggaaggagcttttagcagatcagaatctcaagtttatcgatccattctgcaaaattgctgcaaagacgaaggaccacaccctggtacagaccatagctcggggtgtcttcgaagctatcgtagatcagtctccttttgtgcctgaagagacgatggaggaacagaagacaaaagtgggtgatggtgacctctctgctgaggagatacctgaaaatgaggtatccttgagaagagctgtcagtaaaaagaagacagcactgggcaaaaaccattccagaaaagatggactcagtgatgaaagaggaagagatgactgtggaacctttgaggacacagggccccttctccagtttgactataaggctgttgctgatcgactcctggaaatgaccagcaggaagaacacgccccacttcaacaggaagcgcctctccaaactcatcaagaaattccaagacctttctgaaggaagcagtatatctcaactcagttttgcggaggacatttctgctgatgaagatgaccaaatcctcagtcaaggaaagcataagaagaaaggaaataaacttttagagaaaactaacttggaaaaggagaaaggaagcagagtcttttgtgtagaggaagaggacagtgaaagcagtcttcaaaagagaagaaggaagaagaagaagaagcaccacctgcagcctgaaaatccaggcccagggggtgcagccccgtccctggaacagaaccggggcagggagcccgaggcctctgggccgaaagccctgaaggcacgtgtggccgagccaggtgcagaggccacgtccagcactggggaggagagtggctccgagcatcctccagccgtccccatgcacaataaaaggaaacggccacggaagaagagcccgagggcccacagggaaatgttggaatcagcagtgttgcccccagaggacatgtctcagagtggcccgagtggcagtcatcctcagggacctagagggtccccgacaggtggagcccaactcctaaaaaggaagcggaaacttggagttgtgcccgtcaatggcagtggcctgtccacgccggcctggcctccattgcagcaggaaggccctcccacaggccccgcagagggggcgaacagccacaccacgctgccccagcgcaggaggctgcagaaaaagaaggcagggcccggcagcctggagctctgtggcctgcccagccagaaaacagcaagtttgaaaaagaggaagaaaatgagagtgatgtcaaacttggtggagcacaacggggtgctggagtccgaagctgggcaaccccaggctctgggaagcagtgggacttgcagttccctgaagaagcagaagctgagggcagagagcgactttgtgaagtttgacacccccttcttaccaaagcccctgttcttcagaagagccaagagcagcactgccacccaccctccaggccctgccgtccagctaaacaagacaccatccagctccaagaaagtcacctttgggctgaacagaaacatgactgccgaattcaagaagacagacaagagtatcttggtcagtcccacgggcccttctcgagtggccttcgaccctgaacagaagcccctccacggggtgctgaagacccccaccagctcacctgccagctcacccctggtggccaagaagcccctgaccaccacaccaaggagaaggcccagggctatggatttcttctgaggagcagcagagtcccttgtaaaagactgcttttgtacagaatgcgctataaattatacctttaagaatgtggggccttttttatgattttgtaagttcccataagttgtgtgcacgaggttctgagagtgcccgcaggctgctgcgtcctggcccctctgtagtggctgcgggcgtcttggttgaatcttttgctacaaaccatgtttgcgtttgagctctccaggattttacatttttgggtaacctcagtgattcccattggtgtaggaaatgagaccctctctgaagctgaggagagcacgttgatctgaactttaaatcaatcagtgctgctggcacaatgaaaggtggaactgcacttgtgttgagctctcagttctgcggaatttggtactcattaccgtattcgccgtactaagttggtttctgttagtcttaacagtctgttttcttttaaaagcatgtagggcttcattgccatgttctgtgggtgtttggcaggttaccgatggggaagattcttgtcacagaatcagcaataccatagtttttctacatgtgctcagctgggggtgtggacaggtaggggtggggaaagaagaggctctgcgttctgggggctttttcttctcctccccctacccggtttccctccctgttttcctacctctacggcaagcccaaagtgtcttcccgggagcccagcgcagcccccggctcttacccaggaccccgccccgtgctgagccttctgctgaggtccttgcgtggagcacactcattcctccaagcccttgcgctcccgtttctctctctctccgtccacgttccagccgagtcactgcctgcctgaccggctccatggcagctccccatcttccctagaggctgcctgcgcatctggagcctgcgctccggctcagcgacctttcctctcaaatgcggaagcgtgcacttacagttcagaccgttctcctgtaagttcattacaaacacgggcggaaggcactcaggctttcgttggagaaacagaaataaggccttcttttgagcagcgattgctggatcattgatctgtttgaggaagtgtctgacctgggcctgagagctggagaaggtgcagattcaaagtgagcggctcctgaggagagccgccaaggctgctcgccttctccgtggcttccgcagctaccgtctgcacggtgagagggcacgggcacacggttcgggctggcgtgcagctctcccagccagccacgctctgctcaggcctggaagtgaaagccgcctccttcccgttatgccccccatacaggagcctcggtttttcagcaaaacgcggccagtccccttctccactgctgcctcccagcagagggccccaggatctccaaggtcccagctatggctttggacaacgtggcttcggcccctggggttgcagagcttgcattgggtttacctcggtctcattcattcatggagccaagggtggggtttcacctgcgaacatcagactgacttgctggcgtcaagagcagttgactcactgatgaaggccctggtgaggagaaagcactctgttcttcgcctactctgtaatcgttttgtcataatgagccatgaaaaaagtaatgaacttgtgctgttaatcgtcactgtaatgagaagtcttacgtacaacatagctgtggtggctgcgtggtttaatggctgcattagataggatcctcacatcccattcagaaccaaaactgatacagtgaaacaattaaggtgagcaaatagttttaacttttcttttttttttaagtttcattcttcctagaatatttttctaacaatttttatttcagctttaaagatgggtcatatagccaaacgggccatataatccaacattgttgagatgtcttaggacatctaaggcaaaactggcacatttgttctgcagactattgcaggaatgttttttcctagcatttctatattatctgtccattctgaggaaccagtgaatgtcctataaatgcacctcctgtcaaaaccatgcctgagaggtcccggctgggagtgacagggtgcttcttagattctattggtccttctctcattctccgaacttactcctttttatgggtaagtcaactaggtttacagtcccttatttttaatgcctaagttttgacagcaggaagaaaacaattttttaaaaattctcattacatagacgcacaagaatatgtcacataaagaaaatgtgtttagaatactggttttctatttacgcatgatattttcctaagtaaaattgccaagtggacttggaagtccagaaaggaaaataatttaaattaatgctggtgatcttaacaatattttgtaaaatgatgcttcccccttctccatggtctagtcaattttgtacaattaggtatctgactttacaagtttgttatcctttctaatttttactgaactgaaagcacaaagaagactacacagaaaatctggaaacagttgcaggtgttgggaggaagatgaaatcgagctgtcttttaacttttgtatgtgttttatcagaatttgctggactatgctggcaaggactttgtttacgatcaaattgtactagtgtctgcagggtttgtcagtactcgtcaaagccaagtccaattaaaaaaaaaaagtctttgccctcc

SEQ ID NO: 350 - protein, 762 aa, Human
PQRSAGCSGTAGCAAGDAPAGAMAPAMQPAEIQFAQRLASSEKGIRDRAVKKLRQYISVKTQRETGGFSQEELLQEELANTIAQLVHAVNNSAAQHLFIQTFWQTMNREWKGIDRLRLDKYYMLIRLVLRQSFEVLKRNGWEESRIKVFLDVLMKEVLCPESQSPNGVRFHFIDIYLDELSKVGGKELLADQNLKFIDPFCKIAAKTKDHTLVQTIARGVFEAIVDQSPFVPEETMEEQKTKVGDGDLSAEEIPENEVSLRRAVSKKKTALGKNHSRKDGLSDERGRDDCGTFEDTGPLLQFDYKAVADRLLEMTSRKNTPHFNRKRLSKLIKKFQDLSEGSSISQLSFAEDISADEDDQILSQGKHKKKGNKLLEKTNLEKEKGSRVFCVEEEDSESSLQKRRRKKKKKHHLQPENPGPGGAAPSLEQNRGREPEASGPKALKARVAEPGAEATSSTGEESGSEHPPAVPMHNKRKRPRKKSPRAHREMLESAVLPPEDMSQSGPSGSHPQGPRGSPTGGAQLLKRKRKLGVVPVNGSGLSTPAWPPLQQEGPPTGPAEGANSHTTLPQRRRLQKKKAGPGSLELCGLPSQKTASLKKRKKMRVMSNLVEHNGVLESEAGQPQALGSSGTCSSLKKQKLRAESDFVKFDTPFLPKPLFFRRAKSSTATHPPGPAVQLNKTPSSSKKVTFGLNRNMTAEFKKTDKSILVSPTGPSRVAFDPEQKPLHGVLKTPTSSPASSPLVAKKPLTTTPRRRPRAMDFF

SEQ ID NO: 351 - DNA, 2833 bp, Human
atcctcaccaccaccggcctcttcttcgtctttgactgtccctacctggctcgcaagctgacccttgccatccccatcatcgctgccatcctcttcttcttcgtcatgagctgcctgctgcagacaagcttcaccgaccctgggatcctgccccgggccactgtctgtgaagcagccgccctggagaaacagatcgacaacacaggcagttctacataccggccaccccctcggacccgggaggtgctgatcaacgggcagatggtgaagctgaagtactgcttcacctgcaagatgttccggccaccccgaacctcacactgcagtgtctgcgacaactgtgtggaacgatttgaccatcactgcccctgggtgggcaactgtgtggggagacggaactatcgcttcttctacgcgtttattctctccctctcattcctgacggccttcatcttcgcctgtgtggtcacccacctgacgttgcgcgctcagggaagcaacttcctctccactctgaaggagacaccagcaagcgtgctggagttggtgatctgcttcttctccatctggtccattctgggcctctcagggtttcacacgtacctcgtcgcctccaacctgactactaatgaagacatcaaaggctcgtggtccagcaagaggggcggtgaggcctctgtcaacccctacagccataaaagtattatcaccaactgctgtgctgtgctctgtggccccctacctcccagcctaattgaccggaggggatttgtgcagtccgacaccgtgttgccctcacccatcagaagcgatgagccagcctgcagagccaagcctgatgccagcatggtaggaggccacccctgaccacggctcagtacttgccacctgctggcctgtctgaccctccgcactcacctgccgggaccctccctattccatccaagggaagcagaactgccaaagactcaagtcttttcatatttatttcccatcctgcgtggctttccctgaactgttccgtggctgtgccctctgctccccaaacccaggttcccacagccttgggccctaggtaccccagctgatcagtgccaggagagaccagagcctctggaggctacccaggggaccacaccaagtccttgcctgtgccgggcgagccctgtgtgagtgaggctgtgaactgagcgtgaggcctcccaggtgggggaactgcttgggccttgctgagccagggtcctcagggtgaagcaggactgaggagtggccagctctggatagctggctgtggagaggaagcctccatgggctgctttggtctgtgggctccttcattcccttggtgataatttccctttattctgtgggatttttggtggggttttccccccttttttatggagttggccaataggattgagttggggctccagtagagaaggcagggttggtggtgggtgggggcagcctgtatcagacaaaggtaaatcagccagccaggcacccacagcctcagctcctgtgcagttcctgggcagcacagtggaagtgggagcctggtccttcccctgcccatggagagctctttaagggatcccagcctgcccctccacttctctcccaagccaggtcccggcatgggtgggttatgctcatgctggcaatacttgaaacgggtttattaatgctgggtattttgcacaattttatagacctcttttctacatagtcttttttaaatggaaggagaaaatgtcagccacattactgtctgtgtagtgccaggtgaagggttatcagaaggctggttggttttaataagtttattccaagagaccttctggctggaatgagtgagagtgtgtgtgcatgtgtgtgtgtgttcatgtgtgccctgtatgaatgtggctggctcccatatcccctgggctgccccctgccccatcccctttgagtgtcagaagcactctgagccaaggggacagggggcacgtgcactggtcacgagaaaaccctgggctcccactggggctcagcccagcctcctatctttccttcttctatggacttcagacagccagtgtctggggactctgccactctacccccagccctacccaccagcccccaggtgaggcttccagctgggacctgcccagacaggctgagcctgggcgtggtgggtggggtgatggctctggggagcggctgccatcctacaagccacaccccctcctctgagctctgaatatgggacccagtgccaggagctggaagacaaggtgtttctgccaaacggggacctccatccagagaaaaggaagaaggtgcagggtgggccaagaggcaagtgaaggttggcctgagtctgggccggaaactcagaggatgtttctcctctgctgggagctgtagtttcttatcaaaatagatattgttccaccatccccctccttggcccttcaagtgggctgaagcccttggaaagtgacataggaagtccccagatcttgcccttctcactccagaggctagtggtcacagacagctgggaatggcagccacagagggtcccctctgggagaaacagcttcaccccagcctcagggccctgggccatcactgcagtggccctgggaggtgaggaagaagctggctagaggagggggctcccacctaccttttatttaagccagtattctttgttcctgcttgtaataaaacttcagtttataagagttaaaaaaaaaaaaaaaaaaaaaaaaaaaaaaaaaaaaaaaaaaaaaaaaaaaaaaaaaaaaaaaaaaaaaaaaaaaaaaaaaaaaaaaaa

SEQ ID NO: 352 - protein, 288 aa, Human
ILTTTGLFFVFDCPYLARKLTLAIPIIAAILFFFVMSCLLQTSFTDPGILPRATVCEAAALEKQIDNTGSSTYRPPPRTREVLINGQMVKLKYCFTCKMFRPPRTSHCSVCDNCVERFDHHCPWVGNCVGRRNYRFFYAFILSLSFLTAFIFACVVTHLTLRAQGSNFLSTLKETPASVLELVICFFSIWSILGLSGFHTYLVASNLTTNEDIKGSWSSKRGGEASVNPYSHKSIITNCCAVLCGPLPPSLIDRRGFVQSDTVLPSPIRSDEPACRAKPDASMVGGHP

SEQ ID NO: 353 - DNA, 5967 bp, Human
cctccaggcccagaacggagccgccttggcctcggggtctccctacaccaacggtcctgtccaaaatgcattgctgtcttcacaagagtcagtgagccaaggatacaatttccagcttccaggatcctaccctcatccaataccagcaaagactttgatccagtctctggccagtctaactatggtggttctcagggatctgggcagactcttaatagaccacctgtggcctctaatccagtgacaccttcgcttcatagtggtcctgctccccgaatgccattacctgcttctcagaacccagctactacaccaatgccttctagtagctttcttcctgaagccaacctgccaccacctttgaattggcaatataactatccatccacagcctcacaaacaaaccattgtcctcgtgcatcatcccaaccaactgtatctggaaatacaagtttaaccacaaatcatcaatatgtttcttctggatatccttcacttcaaaatagcttcataaagtcaggtccttctgtacctcccttagtgaatccacctctgcctacaacttttcaaccaggagctcctcatgggccccctccagctggaggcccacccccagtgagggccctcacgcccctgacatcatcatatagagatgtaccccagcccttatttaattcagctgtcaaccaagaaggtattacatcaaataccaataacggatctatggtggtccacagtagttacgacgagattgaaggaggtggcttattggcaacaccacagcttactaacaagaatcccaaaatgagccgaagtgttggatattcatatccctccttaccacctggttatcagaacacaacaccacctggtgcaactggagtaccaccctcttccttgaattacccaagtgggccacaagcctttactcagactcccttaggtgctaatcatttaaccacaagcatgagtggattaagtctacaaccagagggtctaagagttgtcaatcttcttcaagaaagaaacatgcttccgtcaacacctttgaagcctccagttccaaatttgcatgaagacatccagaaactcaactgtaacccagagttatttcgatgcacgctgactagcattcctcagacgcaggccttattgaataaagccaaacttcctttggggctgctgcttcatcctttcaaagacttagtgcaattgcctgtggttacctccagtacaattgtgagatgccgttcatgcaggacgtacatcaatcctttcgtcagctttcttgatcaaaggagatggaagtgtaacttatgttatcgagtcaatgatgttcctgaagaattcttgtacaaccctttgaccagagtttatggagaacctcacagaagaccagaagttcaaaatgctactattgagtttatggctccttcagaatacatgttacgaccacctcagcctccagtgtatctctttgtatttgatgtgtctcacaatgcagtcgaaactggatacttgaattcagtttgccagagtttgttagacaatctggatttgcttcctggcaacactagaacaaaaattggcttcataacatttgacagtacaatccatttctacggtcttcaggaaagtctctctcaacctcagatgctaatagtttcagatattgaagatgtttttatacctatgccagagaacttattagtaaacttaaatgaaagtaaagagctcgtgcaagatttactgaaaactttgccacaaatgtttaccaagactctggagacccagagtgccttgggtcctgcactgcaggctgcctttaagctgatgtctccaactggtggtcgaatgtctgtctttcaaacacaactcccaactcttggagtgggagccctgaaaccacgagaggaaccaaaccacaggtcatctgctaaggatatacacatgacaccatccactgacttctataagaaattagccttggactgttctggtcagcaagttgctgttgacttattccttctcagtggacagtattctgatttggcttctctgggttgtatttctcggtattcagcaggtagtgtctattactatccctcttaccatcatcagcacaacccagtccaagtacagaaattacagaaggaactacagagataccttactcggaagattggctttgaggcagtcatgaggattcggtgcaccaaaggtctttccattcatactttccatggaaacttctttgttaggtcaaccgacttactgtctttgcctaacgtcaacccagacgctgggtatgcagtacagatgtcagtggaagagagtcttactgacactcagttggtttcttttcagtcagcactcttgtatacatccagcaaaggcgaaagaagaattcgtgttcatactttgtgtttgccagtagtttcgactctgaatgatgtctttcttggagctgatgttcaagcaatttcagggttattggccaatatggctgttgacagatctatgactgccagtctgagtgacgctcgggatgctctagtgaatgcagtcattgactccctttcagcttaccgttcttcagtcttaagtaaccagcagcctggactcatggttcctttttctttgcggcttttcccactttttgtgttggctctccttaaacagaaatcattccagactgggacaaatgcacgtctagatgaacgcatttttgctatgtgtcaagtgaaaaaccagcccttggtttaccttatgctcacaactcatcccagtttgtatagagttgacaatctctcagatgagggagcactcaacatcagtgatagaaccatacctcagccccccattcttcagctttcagtggagaagctgagcagagatggagctttcctcatggatgcaggctctgtactgatgctttgggttggaaaaaattgtacacagaattttctcagccaagttctaggagttcaaaactatgcatcaattccacagcctatgacagaccttccagaacttgatacaccagaatctgccagaataatagctttcatctcttggcttagagagcagagaccatttttcccaatactttatgtaataagggatgagagtccaatgaaagcaaacttccttcaaaacatgatagaagacagaacagaatctgcattatcatattatgaattcctgttgcatatacagcaacaagtgaataaatgaatgaatgaagaaatttgacttatttttaaggaatgtcacaatagtgcagaatacctggaaatgtgtaataccttctttttctattatgtttgtggactaatgtgatgattgagatgttctcactgtgatttcaacaacctataagcaaataaaagaccacagcagagaatcaaacatgcaactctgaaatactgtatttttcaaatcagaatatagctacgtatgattggatacttttttcttgccaattatgtttgagttgttatggattaaaataagaatattgcagaggcaaagtacattttgtaaaataaagatttctgtgttctacatgtatatttctcatttttaatttttctgaatctttggctgctacatttaaaacctcacaaacctaagtgttgcagggaagttacaaattgattggtagtgatgtttttaaaataaaaacaatggaaagtaaatataatgtaggaaaactagaattcattccccacacgtgtcttttttttttctttgttaagggaaaggatcatgttgactaaaactaaactaattctagtatagcttgagaaaaatatgaagaaacacattcaagctttaaaatctgtcagtattctttatgcttgaagaacaaagtcactttgatttgaagtgagaactatcattaggtggttttctgatttcctgatgaagagttggacatactgtcttaatctatagtgaaaagaatttgagctgtcttcataaacactgggactagcaatgataatagggagataagaaactttaattatcttgatcctttaagtggattttatttggtgcatttctgctctgggtatataataaaagtgggggtttttggtgaaatgagtgaagaaatgaaaggtttctaaagtgctatccaaatacatcagtaacatttttctaaggagtttaattgttaaattggaagtcattcataagaaatatttatgcttgaatatgaaaatctatgaaagcataaatgctgctgtttgatttggtggatattaagattatacacatccaacatattaaagttatgaaagaaacttgacttctgaaaatccttaagagactgctttcttgattcagctagagaaatattatagtcaaaactattgagtgaattttgtttacaaataggtaaattatacatttgtatatttaaagtgctgtgacatagtatctttaagagtttggctcagttttcacagattcattttgtcttaagaatttcttaaatatgttcatgtataatacttgatcaaaatatttttgggttttttgttttgttttaatgggttagaaaatgtttacaatcttggtcttatatgatcaccaatggaatagtaacttccaggtttatatcaatatgagctgactttaactgagttgtttgggatagggaagaagcagtccctctacagtatacaactactgcttgccagctggatcaaaataatcatgttttatgaaaatatctcccttaagcagtgttaaggttggtttgcagtgtgtaagtggcacattgaactggaagttttcttgaaagctgcttcatctattaagaagcaattttcaaattgtagcgaattatattatcccctcttttaaagaaacagtcgttatatgctgatgtttcttaaaataactaaaatgttcctcttaatgtgattttaaatggagttatttgtaggtcctttcttagtagtaaagaatcttctagagggaaacatttgtgcttttagggataatcttccttgtgcctcactacatccctaagtgggtatgactcttgttattaccacatgcttttttagtatatttcacaaatttacttttaaatattattttagatacggtgtaacatgtgcaattcagaataattttataacaggtcatgaaaaacataactttagttaggattcacaatatttgttctccacataatgagagatgaatgagcctttggagatactgatataaggcaattattttttgcaatgttgaatgtgttttttagtttgattctttttttttcccccaatagggcactacctgccatatcatcttgtattactttttgatgtaaagcgactaatatttacactatgccatattttttttaattatagttgtaaattatgaaagatccttgaattttctacagatctacaactactaatgtaacagacaagggcaatcttggtatttaaatctgagcatggcagttctaccataaaaagtactctatttttctaatttctaggatttttaaaataacatttctgtaagtctgacatactaatagtcactcaagcagtaccatttattttagtttgcatatattttcactgtttttaatttaatgtattgagtctaatagactgttttgcaataattagaataaagatttatttcttctaatcaaagatgcataacagctattatctaggggaccacctaaatgtgatttcaaaattttgttaactattacaaatgtaatccttatatagaaattttaattttgtaaagtagtgtataatattgtaatattaaattcttgttcttaaattcaaatatgtattgatcttcaatgtgctgtgttaaatcttgcttctctgaaaagttggagacaagatttgtcttcctttttacagtttgtaattttcactgttttattcctgttaaaaaaaaaaaaaa

SEQ ID NO: 354 - protein, 986 aa, Human
MPLPASQNPATTPMPSSSFLPEANLPPPLNWQYNYPSTASQTNHCPRASSQPTVSGNTSLTTNHQYVSSGYPSLQNSFIKSGPSVPPLVNPPLPTTFQPGAPHGPPPAGGPPPVRALTPLTSSYRDVPQPLFNSAVNQEGITSNTNNGSMVVHSSYDEIEGGGLLATPQLTNKNPKMSRSVGYSYPSLPPGYQNTTPPGATGVPPSSLNYPSGPQAFTQTPLGANHLTTSMSGLSLQPEGLRVVNLLQERNMLPSTPLKPPVPNLHEDIQKLNCNPELFRCTLTSIPQTQALLNKAKLPLGLLLHPFKDLVQLPVVTSSTIVRCRSCRTYINPFVSFLDQRRWKCNLCYRVNDVPEEFLYNPLTRVYGEPHRRPEVQNATIEFMAPSEYMLRPPQPPVYLFVFDVSHNAVETGYLNSVCQSLLDNLDLLPGNTRTKIGFITFDSTIHFYGLQESLSQPQMLIVSDIEDVFIPMPENLLVNLNESKELVQDLLKTLPQMFTKTLETQSALGPALQAAFKLMSPTGGRMSVFQTQLPTLGVGALKPREEPNHRSSAKDIHMTPSTDFYKKLALDCSGQQVAVDLFLLSGQYSDLASLGCISRYSAGSVYYYPSYHHQHNPVQVQKLQKELQRYLTRKIGFEAVMRIRCTKGLSIHTFHGNFFVRSTDLLSLPNVNPDAGYAVQMSVEESLTDTQLVSFQSALLYTSSKGERRIRVHTLCLPVVSTLNDVFLGADVQAISGLLANMAVDRSMTASLSDARDALVNAVIDSLSAYRSSVLSNQQPGLMVPFSLRLFPLFVLALLKQKSFQTGTNARLDERIFAMCQVKNQPLVYLMLTTHPSLYRVDNLSDEGALNISDRTIPQPPILQLSVEKLSRDGAFLMDAGSVLMLWVGKNCTQNFLSQVLGVQNYASIPQPMTDLPELDTPESARIIAFISWLREQRPFFPILYVIRDESPMKANFLQNMIEDRTESALSYYEFLLHIQQQVNK

SEQ ID NO: 355 - DNA, 2428 bp, Human
cccacgcgtccggtctttgatgaagttgatacagatcaatctggtgtcttgtctgacagagaaatccgaacactggctaccagaattcacgaactgccgttaagtttgcaggatttgacaggtctggaacacatgctaataaattgctcaaaaatgcttcctgctgatatcacgcagctaaataatattccaccaactcaggaatcctactatgatcccaacctgccaccggtcactaaaagtctagtaacaaactgtaaaccagtaactgacaaaatccacaaagcatataaggacaaaaacaaatataggtttgaaatcatgggagaagaagaaatcgcttttaaaatgattcgtaccaacgtttctcatgtggttggccagttggatgacataagaaaaaaccctaggaagtttgtttgcctgaatgacaacattgaccacaatcataaagatgctcagacagtgaaggctgttctcagggacttctatgaatccatgttccccataccttcccaatttgaactgccaagagagtatcgaaaccgtttccttcatatgcatgagctgcaggaatggagggcttatcgagacaaattgaagttttggacccattgtgtactagcaacattgattatgtttactatattctcattttttgctgagcagttaattgcacttaagcggaagatatttcccagaaggaggatacacaaagaagctagtcccaatcgaatcagagtatagaagatcttcatttgaaaaccatctacctcagcatttactgagcattttaaaactcagcttcacagagatgtctttgtgatgtgatgcttagcagtttggcccgaagaaggaaaatatccagtaccatgctgttttgtggcatgaatatagcccactgaccaggaattatttaaccaacccactgaaaacttgtgtgttgagcagctctgaactgattttacttttaaagaatttgctcatggacctgtcatcctttttataaaaaggctcactgacaagagacagctgttaatttcccacagcaatcattgcagactaactttattaggagaagcctatgccagctgggagtgattgctaagaggctccagtctttgcattccaaagccttttgctaaagttttgcactttttttttttcatttcccatttttaagtagttactaagttaactagttattcttgcttctgagtataacgaattgggatgtctaaacctatttttatagatgttatttaaataatgcagcaatatcacctcttattgacaatacctaaattatgagttttattaatatttaagactgtaaatggtcttaaaccactaactactgaagagctcaatgattgacatctgaaatgctttgtaattattgacttcagcccctaagaatgctatgatttcacgtgcaggtctaatttcaaagggctagagttagtactacttaccagatgtaattatgttttggaaatgtacatattcaaacagaagtgcctcattttagaaatgagtagtgctgatggcactggcacattacagtggtgtcttgtttaatactcattggtatattccagtagctatctctctcagttggtttttgatagaacagaggccagcaaactttctttgtaaaaggctggttagtaaattattgcaggccacctgtgtctttgtcatacattcttcttgctgttgtttagtttgttttttttcaaacaaccctctaaaaatgtaaaaaccatgtttagcttgcagctgtacaaaaactgcccaccagccagatgtgaccctcaggccatcatttgccaatcactgagaattagtttttgttgttgttgttgttgttgtttttgagacagagtctctctctgttgcccaggctggagtgcagtggcgcaatctcagctcactgcaacctccgcctcccgggttcaagcagttctgtctcagccttctgagtagctgggactacaggtgcatgccaccacaccctgctaatttttgtatttttagtagagacgggggttccaccatattggtcaggcttatcttgaactcctgacctcaggtgatccacctgcctctgcctcccaaagtgctgagattacaggcataagccagtgcacccagccgagaattagtatttttatgtatggttaaaccttggcgtctagccatattttatgtcataatacaatggatttgtgaagagcagattccatgagtaactctgacaggtattttagatcatgatctcaacaatattcttccaaaatggcatacatcttttgtacaaagaacttgaaatgtaaatactgtgtttgtgctgtaagagttgtgtatttcaaaaactgaaatctcataaaaagttaaatttttgtctgaaaaaaaaaaaaaaaaa

SEQ ID NO: 356 - protein, 204 aa, Human
MLINCSKMLPADITQLNNIPPTQESYYDPNLPPVTKSLVTNCKPVTDKIHKAYKDKNKYRFEIMGEEEIAFKMIRTNVSHVVGQLDDIRKNPRKFVCLNDNIDHNHKDAQTVKAVLRDFYESMFPIPSQFELPREYRNRFLHMHELQEWRAYRDKLKFWTHCVLATLIMFTIFSFFAEQLIALKRKIFPRRRIHKEASPNRIRV

SEQ ID NO: 357 - DNA, 2650 bp, Human
gctctgggagtgtgaaactgggagagacggttaagctggggacggtattcagaattcgagcgcaggagctccgcttctccacctgctcccggggagctattgggatccagagaatcacccgctgatggtttttgcccaggcctgaaacaaccagagagctacgggaaaggaagggcttggcttgccagaggaattttccaagtgctcaaacgccaggcttacggcgcctgtgatccgtccaggaggacaaagtgggatttgaagatccactccacttctgctcatggcgggccagggcctgcccctgcacgtggccacactgctgactgggctgctggaatgcctgggctttgctggcgtcctctttggctggccttcactagtgtttgtcttcaagaatgaagattactttaaggatctgtgtggaccagatgctgggccgattggcaatgccacagggcaggctgactgcaaagcccaggatgagaggttctcactcatcttcaccctggggtccttcatgaacaacttcatgacattccccactggctacatctttgaccggttcaagaccaccgtggcacgcctcatagccatatttttctacaccaccgccacactcatcatagccttcacctctgcaggctcagccgtgctgctcttcctggccatgccaatgctcaccattgggggaatcctgtttctcatcaccaacctgcagattgggaacctatttggccaacaccgttcgaccatcatcactctgtacaatggagcatttgactcttcctcggcagtcttccttattattaagcttctttatgaaaaaggcatcagcctcagggcctccttcatcttcatctctgtctgcagtacctggcatgtagcacgcactttcctcctgatgccccgggggcacatcccatacccactgccccccaactacagctatggcctgtgccctgggaatggcaccacaaaggaagagaaggaaacagctgagcatgaaaacagggagctacagtcaaaggagttcctttcagcgaaggaagagaccccaggggcagggcagaagcaggaactccgctccttctggagctacgctttctctcggcgctttgcctggcacctggtgtggctgtctgtgatacagttgtggcactacctcttcattggcactctcaactccttgctgaccaacatggccggtggggacatggcacgagtcagcacctacacaaatgcctttgccttcactcagttcggagtgctgtgtgccccctggaatggcctgctcatggaccggcttaaacagaagtaccagaaggaagcaagaaagacaggttcctccactttggcggtggccctctgctcgacggtgccttcgctggccctgacatccctgctgtgcctgggcttcgccctctgtgcctcagtccccatcctccctctccagtacctcaccttcatcctgcaagtgatcagccgctccttcctctatgggagcaacgcggccttcctcacccttgctttcccttcagagcactttggcaagctctttgggctggtgatggccttgtcggctgtggtgtctctgctccagttccccatcttcaccctcatcaaaggctcccttcagaatgacccattttacgtgaatgtgatgttcatgcttgccattcttctgacattcttccacccctttctggtatatcgggaatgccgtacttggaaagaaagtccctctgcaattgcatagttcagaagccctcacttttcagccccgaggatggttttgttcatcttccaccacctttgaggacctcgtgtcccaaaagactttgcctatcccagcaaaacacacacacacacacacacacacacaaaataaagacacacaaggacgtctgcgcagcaagaaaagaatctcagttgccaagcagattgatatcacacagactcaaagcaaaggcatgtggaacttctttatttcaaaacagaagtgtctccttgcacttagccttggcagacccttgactccaggggagatgacctgggggaggaagtgtgtcaactatttctttaggcctgtttggctccgaagcctatatgtgcctggatcctctgccacgggttaaattttcaggtgaagagtgaggttgtcatggcctcagctatgcttcctggctctccctcaagagtgcagccttggctagagaactcacagctctgggaaaaagaggagcagacagggttccctgggcccagtctcagcccagccactgatgctggatgaccttggcctgaccctggtctggtctcagaatcacttttcccatctgtaaaattgagatgaattttggtgttgaaagttcttcctggagcagatgtcctagaaggttttaggaatagtgacagagtcaggccaccccaagggccatgggagccagctgacctgcttgaccgaaggatttctgacagactatctttggggatgttttcaagaagggatataagttatttactttgggcatttaaaagaaaatttctctcgggaataattttatagaaaaataaagcttctgtgtctaaggcaaaaaaaaaaaaaaaaaaaaaaaaaaaaaaaaaaaaaaaaaaaaaaaaaaaaaaa

SEQ ID NO: 358 - protein, 491 aa, Human
MAGQGLPLHVATLLTGLLECLGFAGVLFGWPSLVFVFKNEDYFKDLCGPDAGPIGNATGQADCKAQDERFSLIFTLGSFMNNFMTFPTGYIFDRFKTTVARLIAIFFYTTATLIIAFTSAGSAVLLFLAMPMLTIGGILFLITNLQIGNLFGQHRSTIITLYNGAFDSSSAVFLIIKLLYEKGISLRASFIFISVCSTWHVARTFLLMPRGHIPYPLPPNYSYGLCPGNGTTKEEKETAEHENRELQSKEFLSAKEETPGAGQKQELRSFWSYAFSRRFAWHLVWLSVIQLWHYLFIGTLNSLLTNMAGGDMARVSTYTNAFAFTQFGVLCAPWNGLLMDRLKQKYQKEARKTGSSTLAVALCSTVPSLALTSLLCLGFALCASVPILPLQYLTFILQVISRSFLYGSNAAFLTLAFPSEHFGKLFGLVMALSAVVSLLQFPIFTLIKGSLQNDPFYVNVMFMLAILLTFFHPFLVYRECRTWKESPSAIA

SEQ ID NO: 359 - DNA, 6050 bp, Human
ggcttccccacgggaggacgcgaggccccggcccagccatggccccctggcgcaaagctgacaaggagcggcacggcgtggccatatacaacttccaaggcagcggagccccccagctctccctgcagatcggcgatgtggtgcgaatacaggagacgtgtggagactggtataggggatacctcataaagcacaaaatgttacagggcatttttcctaagtcatttatccacatcaaggaagtgacagttgagaaaagaagaaatactgagaacatcattcctgcagaaattcctctggcacaagaagtgacaacgacactttgggaatggggaagcatctggaaacaactctatgtggccagcaaaaaggagcgttttctccaggtgcagtccatgatgtacgatctgatggagtggaggtcccagcttctctcaggaaccttacccaaggatgagctgaaggaactgaagcagaaagtcacgtccaaaattgactatggcaacaaaatccttgagcttgatttgattgtcagagatgaagacggaaatatcttggaccctgataataccagtgtcatcagcttgttccatgcacatgaggaagcaactgataaaatcacagagcgtatcaaagaagaaatgtcaaaagaccagccagattatgcaatgtattcccggatctcctcatcccccacccatagcctctatgtgtttgtgagaaactttgtgtgcagaattggggaagatgctgagctcttcatgtctctctacgaccccaacaagcaaacggtcataagtgagaactacctagtgcgatggggcagccggggcttccctaaggagattgagatgctcaacaatctgaaggtggtcttcacggatcttggaaacaaagacctcaacagggataaaatttacttgatttgtcaaatagtccgggtcggcaagatggatcttaaggatactggtgcaaagaagtgcacgcagggactgaggaggccctttggggtggcagttatggatataacagacatcatcaaggggaaagcagagagtgatgaagaaaagcagcacttcattccttttcacccggttacagctgagaatgacttcctacacagcctgctgggcaaagtcatagcctccaagggggacagtggagggcaaggcctctgggtgaccatgaagatgctggtgggtgacatcattcagattcgcaaggactatccacacctggtggacaggaccaccgtggtggccaggaagctgggattcccagagatcatcatgccaggggatgtcaggaacgacatctacattactctcttacaaggtgactttgacaagtacaacaagaccacacagaggaatgtggaagtcatcatgtgtgtgtgcgcggaggatggcaaaacgctgcctaatgcaatttgcgtgggagcaggggacaagcccatgaatgagtatcgctccgttgtgtactatcaagtcaaacagccacgctggatggaaacagtcaaggtggctgtccctattgaagacatgcagaggatccatctgcgattcatgtttcgacatcggtcatctctggaatctaaagataaaggagaaaagaactttgccatgtcctatgtgaagctgatgaaagaagatgggactactctacacgatggattccatgacttagttgtcctcaagggggacagcaagaagatggaggatgccagcgcatacctgacccttccttcttatcgacaccatgtggaaaacaagggggccacgctgagcaggagctccagcagtgttggggggctttctgtcagctcccgggatgtgttctccatttccaccctggtgtgctccacaaagctcactcagaatgtgggcttgctgggtttgctgaagtggcgtatgaagcctcaactgctacaggagaatttagaaaagttgaagattgtggatggagaggaagtggtgaagtttctccaggatactctggatgccctcttcaacatcatgatggagcattctcaaagtgatgaatatgacatcctcgtctttgatgccttgatttacataataggactcattgcagaccggaaatttcagcatttcaacaccgttctggaggcttacatccaacagcatttcagtgcgaccttggcttacaagaaattgatgacagtgctgaagacttacttggatacctccagcagaggggagcaatgtgagccaatcctaagaacgctgaaggctttggaatatgtgttcaagttcattgttcggtcgaggacattattttcacagctttatgaaggcaaagaacagatggagtttgaagaatccatgagacggctctttgaatccatcaacaatctgatgaaaagtcaatacaaaactaccatccttttgcaggtggcggctttgaaatacatcccatctgtcctgcatgatgtagaaatggtctttgatgcgaagttactcagccaactcctgtatgagttctacacctgcatccctcctgtgaaactccagaagcagaaagtacagtctatgaatgagatagtccagagcaacctctttaaaaagcaagaatgccgggacattctgcttcctgtcatcaccaaagagctgaaggagctgctggagcagaaggatgacatgcaacaccaggtcctggagaggaagtactgcgttgaattgctcaacagcatcttggaagtccttagctaccaggatgcggccttcacctaccaccatatccaagagatcatggtccagctgctgcggacagtgaaccggacagtcatcaccatgggccgggatcacattctgattagtcactttgtggcatgtatgacagccatcttaaaccagatgggtgaccagcactactccttctacattgagaccttccagaccagctctgaacttgtggacttcttgatggagaccttcatcatgttcaaggacctcattggaaagaacgtgtaccctggagactggatggccatgagcatggttcaaaacagggtcttcctgagagctatcaacaagtttgcagaaaccatgaaccagaagttcctagaacacacgaactttgagttccagctgtggaacaactattttcatctggcagtggcttttatcacccaggattctctgcagctggagcagttctcacacgccaaatacaacaaaatcctgaataagtatggggacatgagacggctaattggcttctccatccgtgatatgtggtacaagcttggtcagaacaaaatctgcttcatcccaggcatggtaggacctatattagagatgacacttatccctgaggctgagctccggaaagccaccataccaatcttcttcgacatgatgctgtgtgaatatcaaagaagtggggatttcaaaaagtttgaaaacgaaatcatcctgaagctggaccacgaggtagaagggggccgaggcgacgagcagtacatgcagctgctggagtcaatcctgatggaatgtgctgcagagcacccaaccattgccaagtcggtggagaacttcgtgaacctggtcaaaggcctcctggagaagctgctggattaccggggtgtgatgacagatgagagcaaagacaaccgcatgagctgcactgtgaacctgctgaatttctacaaagataacaacagggaggagatgtacataaggtacctgtacaaactccgcgatcttcacctggactgtgacaattacacagaggctgcctacacgctccttctccacacctggcttctcaagtggtcggatgagcagtgtgcatcacaggtcatgcagacaggccagcagcacccccagacacaccggcagctcaaggagacgctctacgagaccatcataggctactttgacaaaggaaagatgtgggaagaggccataagtctgtgcaaggagctggcggaacagtacgagatggagatctttgactatgagctgctcagccagaacctgatccagcaggcaaaattctatgaaagcatcatgaaaatcctcaggcccaaaccagactactttgctgttggatactacggccagggattcccctccttcctgcggaacaaagtgttcatctaccgcgggaaggaatatgagcgaagagaagatttccagatgcagctgatgacccagttccccaatgcagagaagatgaacaccacctctgccccgggagatgatgtgaagaatgccccaggccagtatatccagtgcttcactgtccagcctgtcttggatgaacatcccaggttcaagaataagccagtgcctgaccagattataaacttctacaaatccaactacgtgcaaaggttccactactcccggcccgtgcgcagggggaccgtagacccagagaatgagtttgcttccatgtggattgagagaacctccttcgtgactgcatacaagctgccggggatcctgcgctggtttgaggtggtgcacatgtcgcagaccacaattagtcctctggagaatgccatagaaaccatgtccacggccaatgagaagatcctgatgatgataaaccagtaccagagtgatgagaccctccccatcaacccactctccatgctcctgaacgggattgtggaccctgctgtcatgggaggcttcgccaagtatgagaaggccttcttcactgaagagtatgtcagggaccaccctgaggaccaggacaagctgacccacctcaaggacctgattgcatggcagatccccttcttgggagctgggattaagatccatgagaaaagggtgtcagataacttgcgacccttccatgaccggatggaggaatgtttcaagaacctgaaaatgaaggtggagaaggagtacggtgtccgagagatgcctgactttgacgacaggagagtgggccgccccaggtctatgctgcgctcatacagacagatgtccatcatctctctggcttccatgaattctgactgcagcacccccagcaagcctacctcagagagctttgacctggaattagcatcacccaagacgccgagagtggagcaggaggaaccgatctccccggggagcaccctgcctgaggtcaagctgcggaggtccaagaagaggacaaagagaagcagcgtagtttttgcggatgagaaagcagctgcagagtcggacctgaagcggctttccaggaagcatgagttcatgagtgacaccaacctctcggagcatgcggccatccccctcaaggcgtctgtcctctctcaaatgagctttgccagccagtccatgcctaccatcccagccctggcgctctcagtggcaggcatccctgggttggatgaggccaacacatctccccgcctcagccagaccttcctccaactctcagatggtgacaagaagacactcacacggaagaaggtcaatcagttcttcaagacaatgctggccagcaaatcggctgaagaaggcaaacagatcccagactcgctgtccacggacctgtgagctgctgctgactagggctgcatgggagagccagggaggggagtttctggaagaggaaagccatgcgtggaacatcgaagcctcagagagtgggagactgtccccatcagttgtccttacttagaggagacagagaggccaatcaggtcccagagctggagtgctaacaagcccagcatcccctggggctgtgatcatggtggatgaggaagcctcaacgtagattcctgaactcaaggtaccagcaagaatgccttctcccagtgtgctctccccaacatcctaggcacagctttcataacccagtttcttaggtgtaagaaactgcttttatctcatttattaagtctcagaacttaacagaaaaggaagccttttaaatattctttttaattttattttagattaacagttttgtactttacatttttttatacaaccaaccagtttcttttctagccaatcatctctgaagagttgctgtttcttactgacaataaaaaatgttctcttggttcg

SEQ ID NO: 360 - protein, 1842 aa, Human
LPHGRTRGPGPAMAPWRKADKERHGVAIYNFQGSGAPQLSLQIGDVVRIQETCGDWYRGYLIKHKMLQGIFPKSFIHIKEVTVEKRRNTENIIPAEIPLAQEVTTTLWEWGSIWKQLYVASKKERFLQVQSMMYDLMEWRSQLLSGTLPKDELKELKQKVTSKIDYGNKILELDLIVRDEDGNILDPDNTSVISLFHAHEEATDKITERIKEEMSKDQPDYAMYSRISSSPTHSLYVFVRNFVCRIGEDAELFMSLYDPNKQTVISENYLVRWGSRGFPKEIEMLNNLKVVFTDLGNKDLNRDKIYLICQIVRVGKMDLKDTGAKKCTQGLRRPFGVAVMDITDIIKGKAESDEEKQHFIPFHPVTAENDFLHSLLGKVIASKGDSGGQGLWVTMKMLVGDIIQIRKDYPHLVDRTTVVARKLGFPEIIMPGDVRNDIYITLLQGDFDKYNKTTQRNVEVIMCVCAEDGKTLPNAICVGAGDKPMNEYRSVVYYQVKQPRWMETVKVAVPIEDMQRIHLRFMFRHRSSLESKDKGEKNFAMSYVKLMKEDGTTLHDGFHDLVVLKGDSKKMEDASAYLTLPSYRHHVENKGATLSRSSSSVGGLSVSSRDVFSISTLVCSTKLTQNVGLLGLLKWRMKPQLLQENLEKLKIVDGEEVVKFLQDTLDALFNIMMEHSQSDEYDILVFDALIYIIGLIADRKFQHFNTVLEAYIQQHFSATLAYKKLMTVLKTYLDTSSRGEQCEPILRTLKALEYVFKFIVRSRTLFSQLYEGKEQMEFEESMRRLFESINNLMKSQYKTTILLQVAALKYIPSVLHDVEMVFDAKLLSQLLYEFYTCIPPVKLQKQKVQSMNEIVQSNLFKKQECRDILLPVITKELKELLEQKDDMQHQVLERKYCVELLNSILEVLSYQDAAFTYHHIQEIMVQLLRTVNRTVITMGRDHILISHFVACMTAILNQMGDQHYSFYIETFQTSSELVDFLMETFIMFKDLIGKNVYPGDWMAMSMVQNRVFLRAINKFAETMNQKFLEHTNFEFQLWNNYFHLAVAFITQDSLQLEQFSHAKYNKILNKYGDMRRLIGFSIRDMWYKLGQNKICFIPGMVGPILEMTLIPEAELRKATIPIFFDMMLCEYQRSGDFKKFENEIILKLDHEVEGGRGDEQYMQLLESILMECAAEHPTIAKSVENFVNLVKGLLEKLLDYRGVMTDESKDNRMSCTVNLLNFYKDNNREEMYIRYLYKLRDLHLDCDNYTEAAYTLLLHTWLLKWSDEQCASQVMQTGQQHPQTHRQLKETLYETIIGYFDKGKMWEEAISLCKELAEQYEMEIFDYELLSQNLIQQAKFYESIMKILRPKPDYFAVGYYGQGFPSFLRNKVFIYRGKEYERREDFQMQLMTQFPNAEKMNTTSAPGDDVKNAPGQYIQCFTVQPVLDEHPRFKNKPVPDQIINFYKSNYVQRFHYSRPVRRGTVDPENEFASMWIERTSFVTAYKLPGILRWFEVVHMSQTTISPLENAIETMSTANEKILMMINQYQSDETLPINPLSMLLNGIVDPAVMGGFAKYEKAFFTEEYVRDHPEDQDKLTHLKDLIAWQIPFLGAGIKIHEKRVSDNLRPFHDRMEECFKNLKMKVEKEYGVREMPDFDDRRVGRPRSMLRSYRQMSIISLASMNSDCSTPSKPTSESFDLELASPKTPRVEQEEPISPGSTLPEVKLRRSKKRTKRSSVVFADEKAAAESDLKRLSRKHEFMSDTNLSEHAAIPLKASVLSQMSFASQSMPTIPALALSVAGIPGLDEANTSPRLSQTFLQLSDGDKKTLTRKKVNQFFKTMLASKSAEEGKQIPDSLSTDL

SEQ ID NO: 361 - DNA, 1030 bp, Human
agatgtaaaccaatttcaggccacaactcccttttctggtacagacagaccatgatgcggggactggagttgctcatttactttaacaacaacgttccgatagatgattcagggatgcccgaggatcgattctcagctaagatgcctaatgcatcattctccactctgaagatccagccctcagaacccagggactcagctgtgtacttctgtgccagcagtttctcgacctgttcggctaactatggctacaccttcggttcggggaccaggttaaccgttgtagaggacctgaacaaggtgttcccacccgaggtcgctgtgtttgagccatcagaagcagagatctcccacacccaaaaggccacactggtgtgcctggccacaggcttcttccccgaccacgtggagctgagctggtgggtgaatgggaaggaggtgcacagtggggtcagcacagacccgcagcccctcaaggagcagcccgccctcaatgactccagatactgcctgagcagccgcctgagggtctcggccaccttctggcagaacccccgcaaccacttccgctgtcaagtccagttctacgggctctcggagaatgacgagtggacccaggatagggccaaacccgtcacccagatcgtcagcgccgaggcctggggtagagcagactgtggctttacctcggtgtcctaccagcaaggggtcctgtctgccaccatcctctatgagatcctgctagggaaggccaccctgtatgctgtgctggtcagcgcccttgtgttgatggccatggtcaagagaaaggatttctgaaggcagccctggaagtggagttaggagcttctaacccgtcatggtttcaatacacattcttcttttgccagcgcttctgaagagctgctctcacctctctgcatcccaatagatatccccctatgtgcatgcacacctgcacactcacggctgaaatctccctaacccagggggaccttagcatgcctaagtgactaaaccaataaaaatg

SEQ ID NO: 362 - DNA, 597 bp, Human
  unsure 80: unknown base
  unsure 112: unknown base
  unsure 119: unknown base
  unsure 145: unknown base
  unsure 382: unknown base
  unsure 426: unknown base
  unsure 430: unknown base
tcagggcgtgggacatctagtaggtgcttgacataatttcactgaattaatgacagagccagtgggaagatacagaaaangaggggctgggctgggcgcggtggttcacgcntgtaatnccagcactttgggaggccaaggaggntggatcacctgaggtcaggagttagaggccagcctggcgaaaccccatctctactaaaaatacaaaatccaggcgtggtggcacacacctgtagtcccagctactcaggaggttgaggtaggagaattgcttgaacctgggaggtggaggttgcagtgagccaagattgcgccattgcactccagcctgggcaacacagcgagactccgtctcaaggaaaaaataaaaataaaaagngggcacgggcccgtgacatccccacccttggaggctgtcttctncagnctctgccctgccctagctccacaccctctcccaggacccatcacgcctgtgcagtggcccccacagaaagactgagctcaaggtgggaaccacgtctgctaacttggagccccagtgccaagcacagtgcctgcatgtatttatccaataaatgtgaaattctgtcc

SEQ ID NO: 363 - DNA, 4149 bp, Human
aaggcgctggcggccggcggctgccccagttctccgccgaggcggtgaggcgcctggccgggctgctccgcagggcactgatccgcgtggcccgcgaggcgcagcgcctgagcgtgctgcacgccaagtgcacccgctttgaggtgcagagcgccgtgcgcctggtgcacagctgggcgctggccgagagctgcgcgctggcagccgtcaaggcgctgtccctgtacagcatgagcgccggcgacgggctgcgccggggcaagtccgcgcgctgcggcctcaccttctcagtgggtcgctttttccgctggatggtggacacccgaatctccgtgcgcatccacgagtacgcagccatctccctcaccgcctgcatggagaacctggtggaggagatccgggccagggtgatggccagccacagccctgatggcggaggggccggaggcggggaggtgtctgctgaggccctggagatggtcatcaacaacgacgccgagctctggggcgtcttgcagccctatgagcatctcatctgcggcaagaacgccaatggtgtcctctccctccccgcatacttcagcccctacaacggcgggtccctgggccatgacgagcgagccgatgcctatgcccagctggagctccgaaccctggagcagtccctcctggccacctgcgtgggcagcatctcggagctgagtgacttggtctcccgtgccatgcaccacatgcaggggcgtcaccccctgtgcccgggtgccagccctgcccgccaggcccgccagccgccacagcccatcacttggtcccccgacgccctccacacgctctactactttctgcggtgtccacagatggagtccatggagaaccccaacctggaccccccgagaatgaccttgaacaatgaacggcccttcatgctgctgccgcccctcatggagtggatgcgcgtggccatcacctacgcagagcaccgccgcagcctcaccgtggacagcggcgacatccggcaggcagcccggctgctgctgcctggtctggactgtgaacctcggcagctcaaacccgaacactgtttcagttccttccggaggctggatgcccgagcagctactgaaaaattcaaccaggacctgggtttccgcatgctcaactgtgggaggacggacctcatcaaccaagccatcgaggccttgggtccggatggggttaacaccatggatgaccagggtatgacgccactgatgtacgcctgcgctgctggggacgaagcgatggtccagatgctgattgatgctggggcaaacttggacatccaggttccaagcaactcccccaggcacccttccatccaccccgacagccggcactggacctcactgacattcgctgtgctgcatggacacatctctgtggtccagttgctgctggatgctggtgcccatgtcgagggctcggcagtgaacggcggcgaggacagctatgcggagacgcccctgcagctggcctctgcggcagggaactatgagctggtcagtttgttgctgagccgaggcgccgaccccctcctcagcatgctggaggcccacggcatgggctcctccctccacgaggacatgaactgcttcagccactcagctgcccacggccacaggaacgtcctgaggaagctcctgacgcagccacagcaggctaaagcggacgtgctgtccctggaggagatcctggccgagggtgtggaggaaagtgatgcgtcgagccagggcagtggcagcgaggggcccgtgcggctgagccggacccgcaccaaggccctacaggaggccatgtactacagcgctgagcacggctacgtggacatcaccatggagctgagggcactgggagtcccctggaagctgcacatctggatcgagtctctgaggacctcgttctcgcagtcgcggtactcggtggtgcagagcctcctgcgggacttcagctccatcagagaggaggagtacaacgaggagctggtgaccgagggcttgcagctcatgttcgacatcctcaagaccagcaaaaacgactccgtcatccagcaactggctaccatcttcacccactgctatggcagcagtcccatccccagcatcccagagatccggaagaccctgccggccaggctagatccacactttttgaacaataaggagatgtcagatgtgaccttcctggtggaaggaaagctgttttatgcacataaagtcctgctggtgacagcttctaacaggttcaagacactaatgaccaataaatcagaacaggatggggacagcagcaagaccatcgagatcagcgacatgaagtaccacatttttcagatgatgatgcagtatctgtactacggaggaacagaatccatggagatccccaccactgacatcctggagctgctgtcagctgccagcctgttccagctggatgccctgcagaggcactgcgagatcctgtgctcccagaccctcagcatggagagtgccgtgaacacctacaaatatgccaagatccacaatgccccagaactggccctgttctgtgagggcttcttcctcaagcacatgaaggccctactggagcaggatgccttccggcagctcatctacggccgcagcagcaaagtgcagggcctggatccactgcaggacctgcagaacaccctggcagagcgcgtgcactctgtctacatcacctcccgggtgtgaggcagggggcggaggctgccgaggccagggcctgtggaggtgccagggcccaccatgtcggggtatggttgtaggccctcttggagccaggttcacggggctgtttcctcctcctcccccagatgtcccccctgtcaccgggcagctcaccctcatctcctctgccctagagctgtttgttcaatcactgatgggcaaaggggagatgtagctaactggtggccctcctccccatctcagtttgcaactcaagggcagccatgcactccccctgggtgtcgctctcccctcctgcaggtcagcagctgatcctgatccacctccgcccaggccctccaagctctactcacccctagggcctcagtaaactcagaccatcccaactggggctcctgggggtacaggaatccttatgaatgtatagaatgcatactgcctaggcccccagtcgtctgcagtaattcaaaagctggtatttttcttcctaaatgtcacatagcaaaggctgcccaaatccccaaacttgttcttcaaaggtttgacaggcttaatgtgggcatccagtggcctgtggacccccccctgccaccacgactgctgccacccggagttcccccattgtctttggtgcctgggcttccagagtccctcccatcaggactaccagcttgctcagttagcagcagagggcagttccccagcttgatggtttctgagctaagtctggcatggaggggcaaggggtaggggatggggtgctgtgtaggaatggcctcagctcttgttttgctgctggttttaggggccaaagtaaatgggtggattctggaacctcaggcctagactaggttgcctttgtgggggcgatgaagcagagtcccctggtcaagtctctcggctcctttaatgtaggattgagagctgggcaaacaggtcccactggggactgtgactcttggagattaaaggacagggcattgatggaaggtaagggccaggagaagaggcctttctgctgtgtcccctcacggccttgccctcgaattctgcaggccctgggctcccctgacacctgtcatatttatggaccagacactggggcagcatcaggcacagtctgtctgggtgcaacttcttcagctgtctggccgcaccttaaaaactatttattcaccaaaagccccaggcatttcagaaggtggcactcaggtcaccctgaaaagcccccaggggcttgcaattctggaaaatattttgactagctgcttggctggatgtacaaagaaataggcattattttattgctgtaatattgtatgatactttaactgtacaataatgttgtcacttactgtaaatgtactatggttttattaacaataaacactcattaacaatg

SEQ ID NO: 364 - protein, 839 aa, Human
MSAGDGLRRGKSARCGLTFSVGRFFRWMVDTRISVRIHEYAAISLTACMENLVEEIRARVMASHSPDGGGAGGGEVSAEALEMVINNDAELWGVLQPYEHLICGKNANGVLSLPAYFSPYNGGSLGHDERADAYAQLELRTLEQSLLATCVGSISELSDLVSRAMHHMQGRHPLCPGASPARQARQPPQPITWSPDALHTLYYFLRCPQMESMENPNLDPPRMTLNNERPFMLLPPLMEWMRVAITYAEHRRSLTVDSGDIRQAARLLLPGLDCEPRQLKPEHCFSSFRRLDARAATEKFNQDLGFRMLNCGRTDLINQAIEALGPDGVNTMDDQGMTPLMYACAAGDEAMVQMLIDAGANLDIQVPSNSPRHPSIHPDSRHWTSLTFAVLHGHISVVQLLLDAGAHVEGSAVNGGEDSYAETPLQLASAAGNYELVSLLLSRGADPLLSMLEAHGMGSSLHEDMNCFSHSAAHGHRNVLRKLLTQPQQAKADVLSLEEILAEGVEESDASSQGSGSEGPVRLSRTRTKALQEAMYYSAEHGYVDITMELRALGVPWKLHIWIESLRTSFSQSRYSVVQSLLRDFSSIREEEYNEELVTEGLQLMFDILKTSKNDSVIQQLATIFTHCYGSSPIPSIPEIRKTLPARLDPHFLNNKEMSDVTFLVEGKLFYAHKVLLVTASNRFKTLMTNKSEQDGDSSKTIEISDMKYHIFQMMMQYLYYGGTESMEIPTTDILELLSAASLFQLDALQRHCEILCSQTLSMESAVNTYKYAKIHNAPELALFCEGFFLKHMKALLEQDAFRQLIYGRSSKVQGLDPLQDLQNTLAERVHSVYITSRV

SEQ ID NO: 365 - DNA, 755 bp, Human
gcagaaagcagagaagcagacatcttctagttcctcccccactctcctctttccggtacctgtgagtcagctaggggagggcagctctcacccaggctgatagttcggtgacctggctttatctactggatgagttccgctgggagatggaacatagcacgtttctctctggcctggtactggctacccttctctcgcaagtgagccccttcaagatacctatagaggaacttgaggacagagtgtttgtgaattgcaataccagcatcacatgggtagagggaacggtgggaacactgctctcagacattacaagactggacctgggaaaacgcatcctggacccacgaggaatatataggtgtaatgggacagatatatacaaggacaaagaatctaccgtgcaagttcattatcgaatgtgccagagctgtgtggagctggatccagccaccgtggctggcatcattgtcactgatgtcattgccactctgctccttgctttgggagtcttctgctttgctggacatgagactggaaggctgtctggggctgccgacacacaagctctgttgaggaatgaccaggtctatcagcccctccgagatcgagatgatgctcagtacagccaccttggaggaaactgggctcggaacaagtgaacctgagactggtggcttctagaagcagccattaccaactgtaccttcccttcttgctcagccaataaatatatcctctttcactcaaaaaaa

SEQ ID NO: 366 - DNA, 555 bp, Human
  unsure 45: unknown base
  unsure 46: unknown base
  unsure 47: unknown base
  unsure 48: unknown base
  unsure 49: unknown base
  unsure 50: unknown base
  unsure 102: unknown base
  unsure 103: unknown base
  unsure 104: unknown base
  unsure 105: unknown base
  unsure 106: unknown base
gagcttcgttgatggtcttttctgtactggaggcctcctgaggcnnnnnnagccccaggacccattaagccacccccgtgttcctgccgtcagtgccaactnnnnnatgtggaagcatctacccgttcactccagtcccaccccacgcctgactcccctctggaaactgcaggccagatggttgctgccacaacttgtgtaccttcagggatggggctcttactccctcctgaggccagctgctctaatatcgatggtcctgcttgccagagagttcctctacccagcaaaaatgagtgtctcagaagtgtgctcctctggcctcagttctcctcttttggaacaacataaaacaaatttaattttctacgcctctggggatatctgctcagccaatggaaaatctgggttcaaccagcccctgccatttcttaagactttctgctccactcacaggatcctgagctgcacttacctgtgagagtcttcaaacttttaaaccttgccagtcaggacttttgctattgcaaatagaaaacccaactcaacctgctt

SEQ ID NO: 367 - DNA, 1385 bp, Human
ttcagagcacaggatggaacaagaactccagccactgactgtctcatgtatctgcaagggccgaggaaattaatgacccaaggaggctatgatatggtccaaaaacttttcctggattttttccgtaggcggctgagccagaggccaactgcagaggaactggaacagaggaacattttgaaacctcggaatgaacaagaggaacaggaggagaagagagagatcaagaggaggctaacccgaaagctcagtcaaaggcccacggtggaagagcttcgggaaagaaagatcctcatccgcttcagtgactacgtggaggtggctgacgctcaggactatgaccgcagggcagataagccgtggacccgcctcaccgctgcagacaaagctgccatccgaaaggagctcaatgaattcaaaagcactgagatggaagttcatgaattgagtagacacttaacaaggtttcaccgaccttaacagtcgaattcctcttgagtgctatgctgtcttcaaaacataaatttataagaaccataagtgctggtatttattcacttccccattacgatgtaaatcttctgaactgccttttttttaaaaagaagaaaaatcaaggaaacacaatcaggattttatgtgtgaaaacgcaaaagtgatggctcggcggtccgagctgctggtcccacttctgacaccaaaatgcatcccaacccccggcagtgccaagggcaccagcagggccctgactgaagactgtctggcaggtggaacggtccttgtcctctccagccaggcccagcaggcactaccttcataagtctccagcaaacctcttcctcacaagtgtctgtcatctgagtccaaagaaagctgaaggggtgggtttgttttgggggtactgtgcaaagctaatgatctggttggacttctacacttggccaaatgtactggctccagacatgacatttggtttgggggccctttgaagttgatgccaagaaggagtgaacacttctcagttgcccctggcttttccgaaccatccagcgtccctgaatataaaatgtacagagtgcagtgggaagcaggctggagagaggttcacaggggccagaccacccagggatttatgagccgattggaggagcttggactttatcctgtggaaaatggggaacccttgaaaatcttcaagcagagagtgacttgatcagagttgtcttttaggaagaattctctggtagctgtgcagggaatggtttacagaagagtaagaccagggcacttatgccagctaggagataccataggaatgtcagcaagagttgcttgagacagcatggtgggagaggatcagggtagtggttatgtgcaaaagctct

SEQ ID NO: 368 - protein, 159 aa, Human
FRAQDGTRTPATDCLMYLQGPRKLMTQGGYDMVQKLFLDFFRRRLSQRPTAEELEQRNILKPRNEQEEQEEKREIKRRLTRKLSQRPTVEELRERKILIRFSDYVEVADAQDYDRRADKPWTRLTAADKAAIRKELNEFKSTEMEVHELSRHLTRFHRP

SEQ ID NO: 369 - DNA, 2385 bp, Human
  unsure 149: unknown base
ccctaacgacagctcgcccgtgcttcgccctcgcagctctcctgtgtccccaaaatgcccttcccgcgtcccccgcccttcagcggtgactgcccaggggactctgtaacgcgacactcagactgccgagcctgccaggcacttcgcgnagggcgctaggggccgggacgcggccgccgagcgtaggttccggcctttactccgagttgcgcacggagccccagctgcggttgtccgctctggggatcacaggccgcggagacccgggagccacccgccgggccccttcagacgacccgcttccgcaaaccggccgtgggactccggcgccgggcggacgaagcggcgccgggcggacgaagcggctccgggaagactcggtcttccccgcccgcctgaggtcgccggggcggggcttcagtgacaggcccgcgcgctaccgcggaaacaggaagttggctgggtgcgcgccggctccggctgcagttcccgggtccctcggccaccgaagccaccctgccctggtgaaagggctcccgcaccgcccggtgctccccatctgcctggcgttgtgcgcagagctggaaagcatggctgttataaatgaattctgattttggggagcagatgccaacttagagcctcgtaccaatctctctgtctttaaaagatgaggtgacttggtgattttcctggaaaattataggtgcccagctaagacctgaatgccatcaccctccccagggctctgcagttttctcgtggtgaacccttgatggatttgttgttgcttgagaaatggcgatgatcgaattggggtttggaagacagaattttcatccattaaagaggaagagttcattgctgttgaaactcatagctgttgtctttgctgtgcttctattttgtgaatttttaatctattacttagcgatctttcagtgtaattggcctgaagtgaaaaccacagcctctgatggtgaacagaccacacgtgagcctgtgctcaaagccatgtttttggctgacacccatttgcttggggaattcctaggccactggctggacaaattacgaagggaatggcagatggagagagcgttccagacagctctgtggttgctgcagccggaagtcgtcttcatcctgggggatatctttgatgaagggaagtggagcacccctgaggcctgggcggatgatgtggagcggtttcagaaaatgttcagacacccaagtcatgtacagctgaaggtagttgctggaaaccatgacattggcttccattatgagatgaacacatacaaagtagaacgctttgagaaagtgttcagctctgaaagactgttttcttggaaaggcattaactttgtgatggtcaacagcgtggcgctgaacggggatggctgtggcatctgctctgaaacagaagcagagctcattgaagtttctcacagactgaactgctcccgagaggcacgtggctccagccggtgtggacctgggcctctgctgcccacgtctgcccctgtcctcctgcagcattatcctctgtatcggagaagtgatgctaactgttctggggaagacgctgctcctgcagaggaaagggacatcccatttaaggagaactatgacgtgctttcacgggaggcatcacaaaagctgctgtggtggctccagccgcgcctggttctcagtggccacacgcacagcgcctgcgaggtgcaccacgggggccgagtccccgagctcagcgtcccatctttcagttggaggaacagaaacaaccccagtttcatcatgggtagcatcacgcccacagactacaccctctccaagtgctacctcccacgtgaggatgtggttttgatcatctactgtggagaggtgggcttccttgtggtcctcacactcactcactttgggcttctagcctcaccttttctttctggtttgaacttgctcggaaagcgtaagacaagatgaagagcaggcgccattataaatatcaaagcccaagaaatggaactttgggcagagatcatgttagaatcaagtggatgatgagaccaattacaggccgtctctctgcacagcacagaaattctcaatcactgaaatgagtaactgcaaaataaatagttgattgtactgttctcatgctataaaagtggacaggtactctacaacaaatctgttttctcatttttatcaaatatatgtatcatcaaaggttgcatctgtacagtatgtaaatgctattaatgtcgtcactcacatgcacgagagtccttgttcccccaggaagggcctggtggccccagcacacacttgggattatgtgtatacataaataaatattgggctgtttccctcttcctg

SEQ ID NO: 370 - protein, 396 aa, Human
MAMIELGFGRQNFHPLKRKSSLLLKLIAVVFAVLLFCEFLIYYLAIFQCNWPEVKTTASDGEQTTREPVLKAMFLADTHLLGEFLGHWLDKLRREWQMERAFQTALWLLQPEVVFILGDIFDEGKWSTPEAWADDVERFQKMFRHPSHVQLKVVAGNHDIGFHYEMNTYKVERFEKVFSSERLFSWKGINFVMVNSVALNGDGCGICSETEAELIEVSHRLNCSREARGSSRCGPGPLLPTSAPVLLQHYPLYRRSDANCSGEDAAPAEERDIPFKENYDVLSREASQKLLWWLQPRLVLSGHTHSACEVHHGGRVPELSVPSFSWRNRNNPSFIMGSITPTDYTLSKCYLPREDVVLIIYCGEVGFLVVLTLTHFGLLASPFLSGLNLLGKRKTR

SEQ ID NO: 371 - DNA, 1358 bp, Human
tctgagcccgacgatgaggccggggacgggagctgagcgtggaggcctcatggtgagtgaaatggagagccatcctccctcgcagggtcctggggacggggagcggagattgtccggctcaagcctctgctccggctcttgggtctctgctgacggcttcctgaggagacggccctcgatggggcaccctggcatgcattatgccccaatgggaatgcaccctatgggtcagagagcgaatatgcctcctgtacctcatggaatgatgccgcagatgatgccccctatgggagggccaccaatgggacaaatgcctggaatgatgtcgtcagtaatgcctggaatgatgatgtctcatatgtctcaggcttccatgcagcctgccttaccgccaggagtaaatagtatggatgtagcagcaggtacagcatctggtgcaaaatcaatgtggactgaacataaatcacctgatggaaggacttactactacaacactgaaaccaaacagtctacctgggagaaaccagatgatcttaaaacacctgctgagcaactcttatctaaatgcccctggaaggaatacaaatcagattctggaaagccttactattataattctcaaacaaaagaatctcgctgggccaaacctaaagaacttgaggatcttgaaggataccagaataccattgttgctggaagtcttattacaaaatcaaacctgcatgcaatgatcaaagctgaagaaagcagtaagcaagaagagtgcaccacaacatcaacagccccagtccctacaacagaaattccgaccacaatgagcaccatggctgctgccgaagcagcagctgctgttgttgcagcagcagcagcggcagcagcagcagcagctgcagccaatgctaatgcttccacttctgcttctaatactgtcagtggaactgttccagttgttcctgagcctgaagttacttccattgttgctactgttgtagataatgagaatacagtaactatttcaactgaggaacaagcacaacttactagtacccctgctattcaggatcaaagtgtggaagtatccagtaatactggagaagaaacatctaagcaagaaactgtagctgattttactcccaaaaaagaagaggaggagagccaaccagcaaagaaaacatacacttggaatacaaaggaagaggcaaagcaagcttttaaagaattattgaaagaaaagcgggtaccatcgaatgcttcatgggagcaggctatgaaaatgattattaatgatccacgatacagtgctttggcaaacttaagtgaaaaaaagcaagcctttaatgcctataaagtccagacag

SEQ ID NO: 372 - DNA, 261 bp, Human
  unsure 41: unknown base
  unsure 42: unknown base
  unsure 196: unknown base
atgtgtcggggagagagcccgcagggaagggtaaagcccannggggcagggccctcccagatgcctgaggagggggcaggtcccctcccctctcctcctcttccctccccatctaaaggggtttggggagagacacaggcaggcgagggggctggtccccagtctgttggggtggtgctcagggtaaagggctatnggcaacaggggaccagaccagggatgagtggggagggcacaaggaccatttgccagaatccaccg

SEQ ID NO: 373 - DNA, 2614 bp, Human
attgcggagagcggctgatcgcagtccggaggtgaggcggaactctgagcaggtggtccattatggctgacatgcaaaatctggtagaaagattggagagggcagtgggccgcctggaggcagtatctcatacctctgacatgcaccgtgggtatgcagacagtccttcaaaagcaggagcagctccatatgtgcaggcatttgactcgctgcttgctggtcctgtggcagagtacttgaagatcagtaaagagattgggggagacgtgcagaaacatgcggagatggtccacacaggtttgaagttggagcgagctctgttggttacagcttctcagtgtcaacagccagcagaaaataagctttccgatttgttggcacccatctcagagcagatcaaagaagtgataacctttcgggagaagaaccgaggcagcaagttgtttaatcacctgtcagctgtcagcgaaagtatccaggccctgggctgggtggctatggctcccaagcctggcccttatgtgaaagaaatgaatgatgccgccatgttttatacaaaccgagtcctcaaagagtacaaagatgtggataagaagcatgtagactgggtcaaagcttatttaagtatatggacagagctgcaggcttacattaaggagttccataccaccggactggcctggagcaaaacggggcctgtggcaaaagaactgagcggactgccatctggaccctctgccggatcaggtcctcctccccctccaccaggcccccctcctcccccagtctctaccagttcaggctcagatgagtctgcttcccgctcagcactgttcgcgcagattaatcagggggagagcattacacatgccctgaaacatgtatctgatgacatgaagactcacaagaaccctgccctgaaggctcagagtggtccagtacgcagtggccccaaaccattctctgcacctaaaccccaaaccagcccatcccccaaacgagccacaaagaaggagccagctgtacttgaactggagggcaagaagtggagagtggaaaatcaggaaaatgtttccaacctggtgattgaggacacagagctgaaacaggtggcttacatatacaagtgtgtcaacacgacattgcaaatcaagggcaaaattaactccattacagtagataactgtaagaaacttggcctggtattcgatgacgtggtgggcattgtggagataatcaacagtaaggatgtcaaagttcaggtaatgggtaaagtgccaaccatatccatcaacaaaacagatggctgccatgcttacctgagcaagaattccctggattgtgaaatagtcagtgccaaatcttccgagatgaatgtcctcattcctacagaaggcggtgactttaatgaattcccagttcctgagcagttcaagaccctatggaacgggcagaagttggtcaccacagtgacagaaattgctggataagcgaagtgccactgggttctttgccctcccttcacaccatgggataaatctgtatcaagacggttcttttctagatttcctctacctttttgctcttaaaactgcttctctgctctgagaagcacagctacctgccttcactgaaatatacctcaggctgagatttggggtgggatagcaggtcagttgatcttctgcaggaaggtgcagcttttccatatcagctcaaccacgccgccagtccattcttaaggaactgccgactaggactgatgatgcattttagctttgagcttttgggggttattctaccaacaaacagtccattggaaagaaaacagtccctggaattaacagatcagaatgttcacactggttaatctttttttaacaatgagcatgaaggtagcagaagctggtgtgtttccagatggttcttctaaccaaactaatttttcactgttgacaagcgaggcaagggttgcactggaccaaaggctgaggcttggccatctagcattccatacaaaattgtttcctataagcattccttttattctctattctatcctgggtctgcctcaaccgtgagataggagagtctctggtactagctgctgtagcagtgcccttcatccagggcagttaatggagtcttggaccctttctttctctgggatccctgcccagcaccttcctatagagatgactttaaaaggaaaaaaaaaaaaaaacccacatgatttcaaggagtctggcattcctgaatccttcttccctgccaggtgcctgtcacctgtcttcactgcctccttttccctgtcatgctcatcagcttatggcttctgtctaagcacctgaacagaggactgaaacctccactgcaggctggttttaggtcttgaattatgtaagaatcttgcacagcactgctaatgtaaatttcagttgtttttccctctaggacaaacacttaccaaaatatgcaacttttttttggtgggaagagagattgtcctgtgatttctacccatttcctgaggcctgtggaaataaacctttatgtacttaaagttatacagaaaatagaataaagttaataccaaacttgaaaaagcggccgc

SEQ ID NO: 374 - protein, 475 aa, Human
MADMQNLVERLERAVGRLEAVSHTSDMHRGYADSPSKAGAAPYVQAFDSLLAGPVAEYLKISKEIGGDVQKHAEMVHTGLKLERALLVTASQCQQPAENKLSDLLAPISEQIKEVITFREKNRGSKLFNHLSAVSESIQALGWVAMAPKPGPYVKEMNDAAMFYTNRVLKEYKDVDKKHVDWVKAYLSIWTELQAYIKEFHTTGLAWSKTGPVAKELSGLPSGPSAGSGPPPPPPGPPPPPVSTSSGSDESASRSALFAQINQGESITHALKHVSDDMKTHKNPALKAQSGPVRSGPKPFSAPKPQTSPSPKRATKKEPAVLELEGKKWRVENQENVSNLVIEDTELKQVAYIYKCVNTTLQIKGKINSITVDNCKKLGLVFDDVVGIVEIINSKDVKVQVMGKVPTISINKTDGCHAYLSKNSLDCEIVSAKSSEMNVLIPTEGGDFNEFPVPEQFKTLWNGQKLVTTVTEIAG

SEQ ID NO: 375 - DNA, 5307 bp, Human
gaataacagttaagttttggggagtaaaaactgtttcaatttttgactgtgttgggggttggtgctcctaatccctgtgttgttaaagggtcgactatattgtatttttgaaaattgctagagagtggacgtaaagtgttctcactaaacaaattataactatgtgaggtagtgcatatattaagtagctagatttggtcattccacaatgtatatgtacttcaaaacatcatgttgtacatgagaaacacagttttatctgttagtcagttttaaaaataaaaaatattccaactagaaactctgttgtagtttttgaaattacaacttggaggctttgaggaactgattagaagtctcctttctgtttcaggctttcatatccaaaccatagatctttagaagtaacatctgttaattaattattaataaatagtttgagtctttattaattcatggataacttgaccattttctctctccttttgcttagataatcccagatcatggccgggcacagtagctcacgcctgtattcccagcagtttgggaggccgaggcaggcagatcacttgaactcaggagtttgagaccagcttgggcaacatggcaaaaccctgtctctattaaaaatacaaaaattagctgggcatggtagtgcatgcctgtagtcccagctacctgggaggctgaggtgggaggatcgcttgagcctgggaggttgaggcttctgtgcgcgatgattgctccagtgatcacgccattgcactccagcctgggtgacagagtgagaccctgtctccaaaaaaaaaaaaaattaagcaagtagcagttacaagaccaaaagttattttcctttttttttttctctataaaattgcccatttggaccaaatctagttataacttatttcagtgtcattaagaaagttgatgaataagtcatattactcagatgttagtagctatgcatttattaatagttttatttataagtatttagtttcactctgttgcagactattttatgctaaaattagctaaagccaaattactatttcttaaaacatattttttactttttttttttttttaaatattattaggtacttcttgcaagggatatgcattagcacatactcaagaaggggaagaaaagaagcaaacttctggtacatcaaataccagaggatcaagacgaaaacctgcaatgacaactcctacaaggaggtctacacgtaacacaagagctgaaacagccagtcagtctcagagatccccaatatcagacaattctgggtgtgatgccccaggtaacagtaatccatctttaagtgttccctcttcagctgagtcagaaaagcaaacaagacaggctccaaaacggaagtctgtaagaagaggaagaaaaccacctttactgaaaaagaaacttcggagctctgtagctgcccctgaaaaatcatcttccaatgattcagtagatgaagaaacagcagaatctgacacatcacctgtgttagaaaaagagcaccaaccagatgtagacagtagtaacatttgtactgtgcagactcatgtagaaaaccagtctgctaattgcttgaaaagttgcaatgagcaaatagaagaaagtgagaagcatactgcaaattatgatacagaggaaagagtaggatcttcatcttctgagtcttgtgctcaagatcttcctgtgctagttggtgaggaaggggaagttaaaaaactcgagaatacaggtatagaggctaatgttttgtgtttggaaagtgagatttctgaaaatattcttgaaaaaggaggtgatccattggaaaagcaagaccagatatctggactttcacaatcagaggtaaagacagatgtatgtacagttcatcttccaaatgattttcctacatgtttaacatctgaaagcaaagtgtaccaacctgtatcttgtcccctaagtgacttatctgagaatgtagagtcagtggttaatgaagaaaaaataacagagagttccctagtagaaattactgaacataaagattttacactaaaaacagaggagcttatagagagccccaagttagaatcttctgagggtgaaattatacagacagtggacagacaatctgttaagagcccagaggttcaattgcttgggcatgttgaaactgaagatgtagaaataattgcaacatgtgatacttttgggaatgaagatttcaataatattcaagactctgaaaataacttactaaaaaataatcttctgaacaccaaattggaaaaatctttagaagaaaagaatgaatcgctgaccgaacatcctagatctacagagttgcctaaaacacacattgaacagattcagaagcattttagtgaggacaacaatgaaatgatacctatggagtgtgattcattttgcagtgaccaaaatgaatctgaagttgaaccatctgtaaatgctgatcttaaacaaatgaatgaaaattctgtgacacactgttctgaaaataatatgccgtcttctgatcttgcggatgaaaaggttgaaactgtttctcaaccatctgaaagcccaaaagataccatagataaaaccaaaaagcctcgtactcgaagatctagatttcattctccatctacaacttggtcacccaacaaagacactccacaagaaaagaagcggccccagtctccatctcccagaagagaaactgggaaagaaagcaggaagtctcaatcaccatctcctaagaatgagtcagccagaggccggaaaaaatcccgttctcagtccccaaaaaaggatattgcaagagaaaggaggcaatctcagtctcggtctccaaaaagggatactactagggaaagcagaagatctgaatcactgtccccaagaagagaaacttctagagagaacaaaagatctcagccaagagtgaaagattcttccccaggagaaaaatccaggtcccagagcagagaacgagaaagtgatagagatgggcagaggagagagagagaaaggagaaccagaaagtggtctaggtccagatctcattctaggtccccctcaagatgtagaacaaaaagtaagagttcatcatttggtagaattgacagagatagttactctccccggtggaagggaagatgggcaaatgatggttggagatgtccacgaggaaatgatcggtacagaaagaatgacccagagaaacagaatgaaaatacaagaaaagaaaaaaatgacatccatctagatgctgatgatccaaattctgctgacaaacatagaaatgactgtcccaattggataacagaaaaaataaactctgggcctgatccaagaaccagaaatccagaaaagttgaaagagtctcattgggaagaaaatagaaatgaaaattcaggaaattcttggaataaaaactttggttctggttgggtatctaaccgtggtagaggcagaggcaaccgtggcagaggcacttacagaagtagttttgcctataaagatcagaatgaaaatcggtggcaaaatcgaaaacccctctcagggaattcaaacagttcagggagtgaatctttcaagtttgtggaacagcaatcctataagcgaaaaagtgaacaggagttctcatttgatacaccagcagatagatctggatggacatctgcatccagctgggccgtgagaaagactttgccagcagatgtacaaaactactactcacgacgaggcagaaattcttcaggtccacagtctggatggatgaaacaagaggaggaaacatctggacaggattctagcctaaaagaccaaacaaaccagcaagttgatggttctcagctacctataaatatgatgcaaccgcaaatgaatgtaatgcagcaacaaatgaatgcacaacaccagcctatgaatatcttcccatatccagtgggtgttcatgctcctttgatgaacatccaacgcaatccatttaacattcatcctcagctacccttgcatctccacacaggagtgcccctcatgcaggtagccactcctaccagtgtatctcagggactaccaccaccaccaccccctcccccaccatcccaacaagtcaactacattgcttcacaaccagatggaaagcaattgcagggtattcctagttcttctcatgtaagtaataacatgagtacaccagttttgcctgctccgacagcagccccaggaaatacgggaatggttcagggaccaagttctggtaatacttcgtcatcaagtcacagcaaagcctctaatgctgctgtaaaattggcagaaagcaaagtaagtgttgcagtggaagccagcgcagatagctcgaagacagacaagaaattgcaaattcaagaaaaagcagcacaagaggtaaaattggccatcaagccattttaccaaaataaagatatcaccaaggaagaatataaagaaattgtacggaaagcagtagataaagtttgtcatagtaagagtggagaagtaaattctactaaagtggcaaatctggttaaagcctatgtagacaaatacaaatattcacggaaggggagccaaaagaaaactctggaagaacctgtgtctactgaaaaaaacataggctgaaatggggaacgctgtcaaggacattatcaggatatctgcaaagtgcaatttcaacatgtaccattaactgaaaatcatacataactgtgattgaaatttggttttgataaaattatttttttaacataggatatgatgttttgttctaaataaatataggtctgcactgcaacttctgtatccttccttcccctccaccctcccccacaaaattcaagggaaagtaaagggtttaaaggaatgtgcatctttactaggactgtgttatagtgtggatactggaaaatgtatagctttttgattagggcaatggagtgcataaattagaaacttctaagtgcactggttttcaaagagatatatataatgcatttattctgtcaggttaaaatataaagtatgatctttatgattttttccctctaattatagaaagttaaataatgtattaccatgaaaaatgtttctaatattaaatagaacatatcagttgcaaagttcctaatgtgtatttttaaagcacatatctgaataaattgcctagatagaaaaaaaattatcacgagtaaaatttagtgttcaaaacattgaaacactcttcacctattgtatgaccaaataaaggttatgctgcttgttacgcgaaggcc

SEQ ID NO: 376 - protein, 1148 aa, Human
MTTPTRRSTRNTRAETASQSQRSPISDNSGCDAPGNSNPSLSVPSSAESEKQTRQAPKRKSVRRGRKPPLLKKKLRSSVAAPEKSSSNDSVDEETAESDTSPVLEKEHQPDVDSSNICTVQTHVENQSANCLKSCNEQIEESEKHTANYDTEERVGSSSSESCAQDLPVLVGEEGEVKKLENTGIEANVLCLESEISENILEKGGDPLEKQDQISGLSQSEVKTDVCTVHLPNDFPTCLTSESKVYQPVSCPLSDLSENVESVVNEEKITESSLVEITEHKDFTLKTEELIESPKLESSEGEIIQTVDRQSVKSPEVQLLGHVETEDVEIIATCDTFGNEDFNNIQDSENNLLKNNLLNTKLEKSLEEKNESLTEHPRSTELPKTHIEQIQKHFSEDNNEMIPMECDSFCSDQNESEVEPSVNADLKQMNENSVTHCSENNMPSSDLADEKVETVSQPSESPKDTIDKTKKPRTRRSRFHSPSTTWSPNKDTPQEKKRPQSPSPRRETGKESRKSQSPSPKNESARGRKKSRSQSPKKDIARERRQSQSRSPKRDTTRESRRSESLSPRRETSRENKRSQPRVKDSSPGEKSRSQSRERESDRDGQRRERERRTRKWSRSRSHSRSPSRCRTKSKSSSFGRIDRDSYSPRWKGRWANDGWRCPRGNDRYRKNDPEKQNENTRKEKNDIHLDADDPNSADKHRNDCPNWITEKINSGPDPRTRNPEKLKESHWEENRNENSGNSWNKNFGSGWVSNRGRGRGNRGRGTYRSSFAYKDQNENRWQNRKPLSGNSNSSGSESFKFVEQQSYKRKSEQEFSFDTPADRSGWTSASSWAVRKTLPADVQNYYSRRGRNSSGPQSGWMKQEEETSGQDSSLKDQTNQQVDGSQLPINMMQPQMNVMQQQMNAQHQPMNIFPYPVGVHAPLMNIQRNPFNIHPQLPLHLHTGVPLMQVATPTSVSQGLPPPPPPPPPSQQVNYIASQPDGKQLQGIPSSSHVSNNMSTPVLPAPTAAPGNTGMVQGPSSGNTSSSSHSKASNAAVKLAESKVSVAVEASADSSKTDKKLQIQEKAAQEVKLAIKPFYQNKDITKEEYKEIVRKAVDKVCHSKSGEVNSTKVANLVKAYVDKYKYSRKGSQKKTLEEPVSTEKNIG

SEQ ID NO: 377 - DNA, 576 bp, Human
  unsure 99: unknown base
  unsure 101: unknown base
aaactggtcagctagagattcttttttctttctaagctgagcacgtagtctgttcagagcttgtttcttccgggagtttgggtcccccattttgaaatncnggtggtactaaagcctttggaaattgtcactaaactatgggcactttttcttaagactcaagtacaacagaaacaagtcattttttttcctgctaatatgattgattagcgaaaatcacgactataacccaaaaactgcaccttctgtcaatattagcagactgtcatattacagggtcaagaaacaaaagctgctgtccagtcatgtttggacaataacgtttggggtcagacgggaaaaagggaggaaagaaaggaaagaaagaggagaaaataactaactttctggaaaacacatttggcttaactgccaaaataaaggctttgcggagaaatgaaaagcctataatcaggatttaggtgtgcaataaaacacagctgacaccagaccaatccctaaaatccatccggattttcccccctttttagaaaagggattaaggaacagggagggggaagtgtgatccttgctttc

SEQ ID NO: 378 - DNA, 1977 bp, Human
attttgctgtggagcggcggggaggaggagccgccgaggagaccccgggcgaggagctgcgagccggaggaggccgcgcggactccgggctttccgccgtcgcggggatctcggggggcaaagggatcgccggggagggggaccagagagccgcgcccgccgcgcggagcgccccttcgcgtcccctgcaccatgagctggggcaccgagctctgggatcagtttgacaacttagaaaaacacacacagtggggaattgatattcttgagaaatatatcaagtttgtgaaagaaaggacagagattgaactcagctatgcaaagcaactcaggaatctttcaaagaagtaccaacctaaaaagaactcgaaggaggaagaagaatacaagtatacgtcatgtaaagctttcatttccaacctgaacgaaatgaatgattacgcagggcagcatgaagttatctccgagaacatggcatcacagatcattgtggacttggcacgctatgttcaggaactgaaacaggagaggaaatcaaactttcacgatggccgtaaagcacagcagcacatcgagacttgctggaagcagcttgaatctagtaaaaggcgatttgaacgcgattgcaaagaggcggacagggcgcagcagtactttgagaaaatggacgctgacatcaatgtcacaaaagcggatgttgaaaaggcccgacaacaagctcaaatacgtcaccaaatggcagaggacagcaaagcagattactcatccattctccagaaattcaaccatgagcagcatgaatattaccatactcacatccccaacatcttccagaaaatacaagagatggaggaaaggaggattgtgagaatgggagagtccatgaagacatatgcagaggttgatcggcaggtgatcccaatcattgggaagtgcctggatggaatagtaaaagcagccgaatcaattgatcagaaaaatgattcacagctggtaatagaagcttataaatcagggtttgagcctcctggagacattgaatttgaggattacactcagccaatgaagcgcactgtgtcagataacagcctttcaaattccagaggagaaggcaaaccagacctcaaatttggtggcaaatccaaaggaaagttatggccgttcatcaaaaaaaataagtctcccaagcagcaaaaggaacccctctcccaccgcttcaacgagttcatgacctccaaacccaaaatccactgcttcaggagcctaaagcgtgggctttctctcaagctgggtgcaacaccggaggatttcagcaacctcccacctgaacaaagaaggaaaaagctgcagcagaaagtcgatgagttaaataaagaaattcagaaggagatggatcaaagagatgccataacaaaaatgaaagatgtctacctaaagaatcctcagatgggagacccagccagtttggatcacaaattagcagaagtcagccaaaatatagagaaactgcgagtagagacccagaaatttgaggcctggctggctgaggttgaaggccggctcccagcacgcaacgagcaggcgcgccggcagagcggactgtacgacagccagaacccacccacagtcaacaactgcgcccaggaccgtgagagcccagatggcagttacacagaggagcagagtcaggagagtgagatgaaggtgctggccacggattttgacgacgagtttgatgatgaggagcccctccctgccatagggacgtgcaaagctctctacacatttgaaggtcagaatgaaggaacgatttccgtagttgaaggagaaacattgtatgtcatagaggaagacaaaggcgatggctggacccgcattcggagaaatgaagatgaagagggttatgtccccacttcatatgtcgaagtctgtttggacaaaaatgccaaaggtgctaagacttatatttaataccat

SEQ ID NO: 379 - DNA, 2705 bp, Human
acccgaggccgcggctgccgactgggtcccctgccgctgtcgccaccatggctccgcaccgccccgcgcccgcgctgctttgcgcgctgtccctggcgctgtgcgcgctgtcgctgcccgtccgcgcggccactgcgtcgcggggggcgtcccaggcgggggcgccccaggggcgggtgcccgaggcgcggcccaacagcatggtggtggaacaccccgagttcctcaaggcagggaaggagcctggcctgcagatctggcgtgtggagaagttcgatctggtgcccgtgcccaccaacctttatggagacttcttcacgggcgacgcctacgtcatcctgaagacagtgcagctgaggaacggaaatctgcagtatgacctccactactggctgggcaatgagtgcagccaggatgagagcggggcggccgccatctttaccgtgcagctggatgactacctgaacggccgggccgtgcagcaccgtgaggtccagggcttcgagtcggccaccttcctaggctacttcaagtctggcctgaagtacaagaaaggaggtgtggcatcaggattcaagcacgtggtacccaacgaggtggtggtgcagagactcttccaggtcaaagggcggcgtgtggtccgtgccaccgaggtacctgtgtcctgggagagcttcaacaatggcgactgcttcatcctggacctgggcaacaacatccaccagtggtgtggttccaacagcaatcggtatgaaagactgaaggccacacaggtgtccaagggcatccgggacaacgagcggagtggccgggcccgagtgcacgtgtctgaggagggcactgagcccgaggcgatgctccaggtgctgggccccaagccggctctgcctgcaggtaccgaggacaccgccaaggaggatgcggccaaccgcaagctggccaagctctacaaggtctccaatggtgcagggaccatgtccgtctccctcgtggctgatgagaaccccttcgcccagggggccctgaagtcagaggactgcttcatcctggaccacggcaaagatgggaaaatctttgtctggaaaggcaagcaggcaaacacggaggagaggaaggctgccctcaaaacagcctctgacttcatcaccaagatggactaccccaagcagactcaggtctcggtccttcctgagggcggtgagaccccactgttcaagcagttcttcaagaactggcgggacccagaccagacagatggcctgggcttgtcctacctttccagccatatcgccaacgtggagcgggtgcccttcgacgccgccaccctgcacacctccactgccatggccgcccagcacggcatggatgacgatggcacaggccagaaacagatctggagaatcgaaggttccaacaaggtgcccgtggaccctgccacatatggacagttctatggaggcgacagctacatcattctgtacaactaccgccatggtggccgccaggggcagataatctataactggcagggtgcccagtctacccaggatgaggtcgctgcatctgccatcctgactgctcagctggatgaggagctgggaggtacccctgtccagagccgtgtggtccaaggcaaggagcccgcccacctcatgagcctgtttggtgggaagcccatgatcatctacaagggcggcacctcccgcgagggcgggcagacagcccctgccagcacccgcctcttccaggtccgcgccaacagcgctggagccacccgggctgttgaggtattgcctaaggctggtgcactgaactccaacgatgcctttgttctgaaaaccccctcagccgcctacctgtgggtgggtacaggagccagcgaggcagagaagacgggggcccaggagctgctcagggtgctgcgggcccaacctgtgcaggtggcagaaggcagcgagccagatggcttctgggaggccctgggcgggaaggctgcctaccgcacatccccacggctgaaggacaagaagatggatgcccatcctcctcgcctctttgcctgctccaacaagattggacgttttgtgatcgaagaggttcctggtgagctcatgcaggaagacctggcaacggatgacgtcatgcttctggacacctgggaccaggtctttgtctgggttggaaaggattctcaagaagaagaaaagacagaagccttgacttctgctaagcggtacatcgagacggacccagccaatcgggatcggcggacgcccatcaccgtggtgaagcaaggctttgagcctccctcctttgtgggctggttccttggctgggatgatgattactggtctgtggaccccttggacagggccatggctgagctggctgcctgaggaggggcagggcccacccatgtcaccggtcagtgccttttggaactgtccttccctcaaagaggccttagagcgagcagagcagctctgctatgagtgtgtgtgtgtgtgtgtgttgtttcttttttttttttttacagtatccaaaaatagccctgcaaaaattcagagtccttgcaaaattgtctaaaatgtcagtgtttgggaaattaaatccaataaaaacattttgaagtgtgaaaaaaaaaaaaaaaaaaaaaaaaaaaaaaaaaaaaaaaaaaaaaaaaaaaaaaaaaaaaaaaaaaaaaa

SEQ ID NO: 380 - DNA, 2110 bp, Human
tgtactggaccagcttgtgcctttcaggctcttgcctgggcacctgggtgcttgcggcccacaagataagatatattgcgttgaactataatttatgttgattgctgaatgatttagggcgggggggtgggcaccccctgaaattctgccctggaggagtggcctcaccctaaccctggccgtggctaataataaggcccacctcttagggccgtggagtgaaataagttttccaggtaatgcgcagtagagccctcagccctccgctgaagttgcgttaggaaggaggaagggagaggtaaatgctgagcccgcaggcggcagtctgtgcctcggagagaaactttatcccaaccttgctgggggccttgacgcccaccttgccccaagagcaccccggcagccacccctgccctctggggtcctgccaccccgagcccgaccttcccccttttcccccgcgccgggccaatagcctcctaactgcgtcgtgctcatcacctttgcgtcgtttcttcgctccacaaacgtttactgagcgccttccacacgccaggcgccagactcgcgcggggaaacagggataagcactgaggaggggtcccagccctcagcgatgggatttcagagcgggagataaagggttgcccagaagggtggtgagtggaatggctgatataaacaacgggggcgcgatgaaatacacaggagggctgctagtcacatatggggcgggtgccgagggcccttgactaagggaggcttcctgcacgggtgacacccaagcggagtcctgacgacctgcgtcagaagtagccaggcgaggaggaggggaaaggaatccacgtcccgagcagagaggcagcgttccctacacagcacaggacacggtccgcgcacagaagccgcaggagacgcaggcacaggggctggggagaatccttgctgggccctcgccgcctccctctgccgggtgtctggtgccagcctcctgcctggcagaggagctccagcccctgctcccggaagcccctccaggccttcggcttccctgactgggcatgggcccctcgtcccctcgtcccctcgggtacggggccggtctccccgcccgcgggcggcgaagtaaaggcccagcgcagcccgcgctcctgccctggggcctcgtctttctccaggaaaacgtggaccgctctccgccgacaggtctcttccacagacccctgtcgccttcgcccccggtctcttccggttctgtcttttcgctggctcgatacgaacaaggaagtcgcccccagcggagccccggctcccccaggcagaggcggccccgggggcggagtcaacggcggaggccacgccctctgtgaaagggcggggcatgcaaattcgaaatgaaagcccgggaacgccggaagaagcacgggtgtaagatttcccttttcaaaggcggagaataagaaatcagcccgagagtgtaagggcgtcaatagcgctgtggacgagacagagggaatggggcaaggagcgaggctggggctctcaccgcgacttgaatgtggatgagagtgggacggtgacggcgggcgcgaaggcgagcgcatcgcttctcggccttttggctaagatcaagtgtagtatctgttcttatcagtttaatatctgatacgtcctctatccgaggacaatatattaaatggatttttggagcagggagatggaataggagcttgctccgtccactccacgcatcgacctggtgttgcagtacctccaggaacggtgcaccccctccggggatacaacgtgtttcctaaaagtagagggaggtaagagacggtagcacctgcggggcggcttgcacgccgagtgcctgtgacgcgccggcttgacttaactgcttccctgaagtaccgtgaggttcctgatgtgcgggcggtagacggtaggcttatgcggcacgctttcgtttccaccgtggctactgcgctttgggaaggccacgacctcctcctttggggaggtccttaggatctcagcttggcagtcgagtgggtggcgaccttttaaaggaatgggacccacccggagttcttctttctcctgtctc

SEQ ID NO: 381 - protein, 12 aa, Human
MGPTRSSSFSCL

SEQ ID NO: 382 - DNA, 1787 bp, Human
ttcttgacttgatgcaggcacagatttatcaagctcctcagtcaacaaacacatcaccggaagaaacatggaaggaaaggaattttaaaaggaaataccaatctctgtgcaaacaaagccttgtatattcatgtttgcaccaatctactgtgagatttatgaagaaaaacaaattgcggacaactctctatgtacacttacaaatgcctcagttgatgcttgtgggctgtttgtcagcgttctgtgataatgaacacatggacttctgtttattaaattcagttgacccctttagccaattgccaggagcctggatttttacttccaactgctgatatctgtgtaaaaattgatctacatccaccctttaaaagcattgatgaattaattagaactttagacaacaaagaaaaattgaaaaagaattctcagtaaaagcgaattcgatgttcaaaacaaactacaaagagacaagacttctctgtttactttctaagaactaatataattgctaccttaaaaaggaaaaaatgaacagcacatgtattgaagaacagcatgacctggatcactatttgtttcccattgtttacatctttgtgattatagtcagcattccagccaatattggatctctgtgtgtgtctttcctgcaagcaaagaaggaaagtgaactaggaatttacctcttcagtttgtcactatcagatttactctatgcattaactctccctttatggattgattatacttggaataaagacaactggactttctctcctgccttgtgcaaagggagtgcttttctcatgtacatgaatttttacagcagcacagcattcctcacctgcattgccgttgatcggtatttggctgttgtctaccctttgaagttttttttcctaaggacaagaagatttgcactcatggtcagcctgtccatctggatattggaaaccatcttcaatgctgtcatgttgtgggaagatgaaacagttgttgaatattgcgatgccgaaaagtctaattttactttatgctatgacaaataccctttagagaaatggcaaatcaacctcaacttgttcaggacgtgtacaggctatgcaatacctttggtcaccatcctgatctgcaaccggaaagtctaccaagctgtgcggcacaataaagccacggaaaacaaggaaaagaagagaatcataaaactacttgtcagcatcacagttacttttgtcttatgctttactccctttcatgtgatgttgctgattcgctgcattttagagcatgctgtgaacttcgaagaccacagcaattctgggaagcgaacttacacaatgtatagaatcacggttgcattaacaagtttaaattgtgttgctgatccaattctgtactgttttgtaaccgaaacaggaagatatgatatgtggaatatattaaaattctgcactgggaggtgtaatacatcacaaagacaaagaaaacgcatactttctgtgtctacaaaagatactatggaattagaggtccttgagtagaaccaaggatgttttgaagggaagggaagtttaagttatgcattattatatcatcaagattacattttgaaaaggaaatctagcatgtgaggggactaagtgttctcagagtgatgttttaatccagtccaataaaaatatcttaaaactgcattgtacagctccctccctgcgttttattaaatgatgtatattaaacaaagatcaataaaaaaaaaaaaaaaaaaaaaaaaaaaaaaaaaa

SEQ ID NO: 383 - DNA, 738 bp, Human
aaagcagaattgagagtttgttcttacacacaagtttaatgccaccttcctctgtctgccatggaccaacaagcaatatatgctgagttaaacttacccacagactcaggcccagaaagttcttcaccttcatctcttcctcgggatgtctgtcagggttcaccttggcatcaatttgccctgaaacttagctgtgctgggattattctccttgtcttggttgttactgggttgagtgtttcagtgacatccttaatacagaaatcatcaatagaaaaatgcagtgtggacattcaacagagcaggaataaaacaacagagagaccgggtctcttaaactgcccaatatattggcagcaactccgagagaaatgcttgttattttctcacactgtcaacccttggaataacagtctagctgattgttccaccaaagaatccagcctgctgcttattcgagataaggatgaattgatacacacacagaacctgatacgtgacaaagcaattctgttttggattggattaaatttttcattatcagaaaagaactggaagtggataaacggctcttttttaaattctaatgacttagaaattagaggtgatgctaaagaaaacagctgtatttccatctcacagacatctgtgtattctgagtactgtagtacagaaatcagatggatctgccaaaaagaactaacacctgtgagaaataaagtgtatcctgactcttga

SEQ ID NO: 384 - protein, 225 aa, Human
MDQQAIYAELNLPTDSGPESSSPSSLPRDVCQGSPWHQFALKLSCAGIILLVLVVTGLSVSVTSLIQKSSIEKCSVDIQQSRNKTTERPGLLNCPIYWQQLREKCLLFSHTVNPWNNSLADCSTKESSLLLIRDKDELIHTQNLIRDKAILFWIGLNFSLSEKNWKWINGSFLNSNDLEIRGDAKENSCISISQTSVYSEYCSTEIRWICQKELTPVRNKVYPDS

SEQ ID NO: 385 - DNA, 1899 bp, Human
gcgccgggcggagggggagagcgcgggccgcgcgggcgggaagcgaagaggcgggcgggccagcgaggagcgcggagagaaaaggcgcgagcggccaggagggctcaggccgagacaccttgcagctgccgccgccgccaccgagccgccgctgtgctcactgatccgcctccagggccaccgccatgtcgagccgcggtgggaagaagaagtccaccaagacgtccaggtctgccaaagcaggagtcatctttcccgtggggcggatgctgcggtacatcaagaaaggccaccccaagtacaggattggagtgggggcacccgtgtacatggccgccgtcctggaatacctgacagcggagattctggagctggctggcaatgcagcgagagacaacaagaagggacgggtcacaccccggcacatcctgctggctgtggccaatgatgaagagctgaatcagctgctaaaaggagtcaccatagccagtgggggtgtgttacccaacatccaccccgagttgctagcgaagaagcggggatccaaaggaaagttggaagccatcatcacaccacccccagccaaaaaggccaagtctccatcccagaagaagcctgtatctaaaaaagcaggaggcaagaaaggggcccggaaatccaagaagaagcagggtgaagtcagtaaggcagccagcgccgacagcacaaccgagggcacacctgccgacggcttcacagtcctctccaccaagagcctcttccttggccagaagctgaaccttattcacagtgaaatcagtaatttagccggctttgaggtggaggccataatcaatcctaccaatgctgacattgaccttaaagatgacctaggaaacacgctggagaagaaaggtggcaaggagtttgtggaagctgtctcggaactccggaaaaagaacgggcccttggaagtagctggagctgctgtcagcgcaggccatggcctgcctgccaagtttgtgatccactgtaatagtccagtttggggtgcagacaagtgtgaagaacttctggaaaagacagtgaaaaactgcttggccctggctgatgataagaagctgaaatccattgcatttccatccatcggcagcggcaggaacggttttccaaagcagacagcagctcagctgattctgaaggccatctccagttacttcgtgtctacaatgtcctcttccatcaaaacggtgtacttcgtgctttttgacagcgagagtataggcatctatgtgcaggaaatggccaagctggacgccaactaggctgagcaatgacagaaccagctgcaccatgtaccccaccttcagtttaaaagaaaaaaaaaatccccttcactcctactgggaggtgggacccctttcattttcagttttgctcatctagggaaaataaggctttggtttccagtttaattgtttttgaccttctaaaatgtttttatgttagcactgatagttggcattactgttgttaagcactgtgttccagaccgtgtctgacttagtgtaacctaggagattttatagttttattttaatgaaaccctgattgacgcacagcagtggggagaacagcgtcttttacctgtcaccgaagccaggaagccccgtttgtaagcgtgtgttgtggtgctttattgtacatcctccagtggcgttctttttactctaatgttcttttggtttcccccctcagaagaatcatgaatttgcaacagacctaatttttggttactttttgtcttattgatggatttgaaaatgaaagatttaataaggcaaagcagaatctgttgtccttaattatatttgcaatttggaatttgtgtgagttgatttagtaaaatgttaaaccgtt

SEQ ID NO: 386 - protein, 372 aa, Human
MSSRGGKKKSTKTSRSAKAGVIFPVGRMLRYIKKGHPKYRIGVGAPVYMAAVLEYLTAEILELAGNAARDNKKGRVTPRHILLAVANDEELNQLLKGVTIASGGVLPNIHPELLAKKRGSKGKLEAIITPPPAKKAKSPSQKKPVSKKAGGKKGARKSKKKQGEVSKAASADSTTEGTPADGFTVLSTKSLFLGQKLNLIHSEISNLAGFEVEAIINPTNADIDLKDDLGNTLEKKGGKEFVEAVSELRKKNGPLEVAGAAVSAGHGLPAKFVIHCNSPVWGADKCEELLEKTVKNCLALADDKKLKSIAFPSIGSGRNGFPKQTAAQLILKAISSYFVSTMSSSIKTVYFVLFDSESIGIYVQEMAKLDAN

SEQ ID NO: 387 - DNA, 469 bp, Human
gttggcttggctgttgacatggatgaaattgaaaagtaccaagaagtggaagaagaccaagacccatcatgccccaggctcagcagggagctgctggatgagaaagagcctgaagtcttgcaggactcactggatagatgttattcgactccttcaggttatcttgaactgcctgacttaggccagcctacagcagtgctgtttactcattggaggaacagtaccttggcttggctcttgacgtggacaaaattaaaaagaaggggaaggggaaaaaaagaaggggaagaagatcaaagaaggaaagaagactgggacagacacagaaggggaagaagatcaaaaccaccatgccccaggctcaacggcgtgctgatggaagtggaagagcgtgaagtcttacaggactcactggatagatgttattcgatccgtcatgtactttgaactacctgactcattccagcac

SEQ ID NO: 388 - DNA, 2923 bp, Mouse
ggttgttacttaggtgcgctagcctgcggagcccgtccgtgctgttctgcggcaaggcctttcccagtgtccccacgcggaaggcaactgcctgagaggcgcggcgtcgcaccgcccagagctgaggaagccggcgccagttcgcggggctccgggccgccactcagagctatgagctacggccgcccccctcccgatgtggagggtatgacctccctcaaggtggacaacctgacctaccgcacctcgcccgacacgctgaggcgcgtcttcgagaagtacgggcgcgtcggcgacgtgtacatcccgcgggatcgctacaccaaggagtcccgcggcttcgccttcgttcgctttcacgacaagcgcgacgctgaggacgctatggatgccatggacggggccgtgctggacggccgcgagctgcgggtgcaaatggcgcgctacggccgccccccggactcacaccacagccgccggggaccgccaccccgcaggtacgggggcggtggctacggacgccggagccgcagccctaggcggcgtcgccgcagccgatcccggagtcggagccgttccaggtctcgcagccgatctcgctacagccgctcgaagtctcggtcccgcactcgttctcgatctcggtcgacctccaagtccagatccgcacgaaggtccaagtccaagtcctcgtcggtctccagatctcgttcgcggtccaggtcccggtctcggtccaggagtcctcccccagtgtccaagagggaatccaaatccaggtcgcgatcgaagagtccccccaagtctcctgaagaggaaggagcggtgtcctcttaagaaaatggtaatgtctgggaatccgagacacataaccctaattcataaatgggatttggggtaggtctttttgagtcgtgttaatgtaagaatgactcctatcattaggagtgctgctcggaggttactcacctttgggagtaatactgaagagaggggtctgcagaaaggatgtgtatgaagcttagataataatggctgtttcgtaaactgtttgagacctattaatgaaaatgactatttcttgctgtttttatccaacgtctgcattttccccctttaaagctgcggtctcctgtttgataaaagaatattggccagtattgcagattttaactgatttggctgatcctccagggaccagtttctgtgggcgtgtattggagcaggtttgtctttaaatgttaaagatgcactatcctcttagagaaacaatcagttcaactattgttgtactgactgggacttcatattctaatggatgtggcaaaagaattgcaataagaagcagtgaacatttggaaccccaaaagaaagttacaggtattgcactgggtggggaaaggatagtgtgtctttaactcttaaattgtttggtcctattttttaaaaaggaaagggccctaagtagctcagatattaaagtagtattctcaattaccaaatgtttcatttgaaacaatttatcttaatgaaatatagaccaattctctgatctcgagttgtttttgtttggatacagcccttttttttttctttttttttcttccccttacctttcttcaccttggttatttggccaggaatacgtaaattcaaacttgtacatgctgatggtagcctttgtgaaattttcctaattgggccttttaaaaacatggctgggtggaacatttctgtaccctactggtttgaccagagccttagtaagtacgtgcctgaaactgaaaccatgtgcactttaatggaaggtaagctgaacttctttcttttcaaacctagatgtatcggcaagcagtgtaaacggaggacttggggaaaaaggaccacatagtccatcgaagaagagtccttggaacaagcaactggctattgaaaaggttattttgtaacatttgtctaactttttacttgtttaagctttgcctcagttggcaaacttcattttatgtgccattttgttgctgttattcaaatttcttgtaatttagtgaggtgaacgacttcagatttcattattggatttggatatttgaggtaaaatttcattttgttatatagtgctgactttttttgtttgaaattaaacagattggtaacctaatttgtggcctcctgacttttaaggaaaacgtgtgcagccattacacacagcctaaagctgtcaagagattgactcggcattgccttcattccttaaaattaaaaacctacaaaagttggtgtaaatttgtatatgttatttacattcagatctaaatggtaatctgaacccaaatttgtataaagacttttcaggtgaaaagacttgattttttgaaaggattgtttatcaaacacaattctaatctcttctcttatgtatttttgtgcactaggcgcagttgtgtagcagttgagtaatgctggttagctgttaaggtggcgtgttgcagtgcagagtgcttggctgtttcctgttttctcccgattgctcctgtgtaaagatgccttgtcgtgcagaaacaaatggctgtccagtttattaaaatgcctgacaactgcacttccagtcacccgggccttgcatataaataacggagcatacagtgagcacatctagctgatgataaatacacctttttttccctcttccccctaaaaatggtaaatctgatcatatctacatgtatgaacttaacatggaaaatgttaaggaagcaaatggttgtaactttgtaagtacttataacatggtgtatctttttgcttatgaatattctgtattataaccattgtttctgtagtttaattaaaacattttcttggtgttagcttttctcagaaaaaaaaaaaaaaaaaaaaaaaaaaaaaaaaaaaaaaaaaa

SEQ ID NO: 389 - DNA, 503 bp, Human
  unsure 31: unknown base
  unsure 53: unknown base
  unsure 74: unknown base
  unsure 77: unknown base
  unsure 94: unknown base
  unsure 104: unknown base
  unsure 109: unknown base
  unsure 118: unknown base
  unsure 128: unknown base
  unsure 190: unknown base
  unsure 412: unknown base
  unsure 439: unknown base
  unsure 445: unknown base
  unsure 446: unknown base
  unsure 447: unknown base
  unsure 448: unknown base
  unsure 449: unknown base
  unsure 450: unknown base
  unsure 452: unknown base
  unsure 453: unknown base
  unsure 454: unknown base
  unsure 455: unknown base
  unsure 456: unknown base
  unsure 457: unknown base
  unsure 458: unknown base
  unsure 459: unknown base
gaaccgtgattaccgggatgcacaggagttngctgctgatgtacggcttatgntctccaactgctataagtacnatnccccagatcacgatgtngtggcaatgncacgnaagctacangatgtatttnagttccgttatgccaagatgccagatgaaccactagaaccagggcctttaccagtctctacngccatgccccctggcttggccaaatcgtcttcagagtcctccagtgaggaaagtagcagtgagagctcctctgaggaagaggaggaggaagatgaggaggacgaggaggaagaagagagtgaaagctcagactcagaggaagaaagggctcatcgcttagcagaactacaggaacagcttcgggcagtacatgaacaactggctgctctgtcccagggtccnatatccaagcccaagaggaaaagaganaaaaannnnnnannnnnnnnagaaaagcggttacaagatgtcagcggacagctcaattctacta

SEQ ID NO: 390 - DNA, 2672 bp, Human
ttccctttgcaattgccttgggtcctgccgcacagagcggcctgtctttatcagaggtccctctgccagggggagggccccagagaaaaccagaaagagggtgagagactgaggaagataaagcgtcccagggcctcctacaccagcgcctgagcaggaagggggaggggccatgactacgaggccctgggaggtcactttagggagggctgtcctgaaacctggagcctggagcagaaagtgaaaccctggtgctccagacaaagatcttagtcgggactagccggccaaggatgaagcctcacttcagaaacacagtggagcgaatgtatcgagacacattctcctacaacttttataatagacccatcctttctcgtcggaataccgtctggctgtgctacgaagtgaaaacaaagggtccctcaaggccccgtttggacgcaaagatctttcgaggccaggtgtattcccagcctgagcaccacgcagaaatgtgcttcctctcttggttctgtggcaaccagctgcctgcttacaagtgtttccagatcacctggtttgtatcctggaccccctgcccggactgtgtggcgaagctggccgaattcctggctgagcaccccaatgtcaccctgaccatctccgccgcccgcctctactactactgggaaagagattaccgaagggcgctctgcaggctgagtcaggcaggggcccgcgtgaagattatggacgatgaagaatttgcatactgctgggaaaactttgtgtacagtgaaggtcagccattcatgccttggtacaaattcgatgacaattatgcattcctgcaccgcacgctaaaggagattctcagaaacccgatggaggcaatgtatccacacatattctacttccactttaaaaacctacgcaaagcctatggtcggaacgaaagctggctgtgcttcaccatggaagttgtaaagcaccactcacctgtctcctggaagaggggcgtcttccgaaaccaggtggatcctgagacccattgtcatgcagaaaggtgcttcctctcttggttctgtgacgacatactgtctcctaacacaaactacgaggtcacctggtacacatcttggagcccttgcccagagtgtgcaggggaggtggccgagttcctggccaggcacagcaacgtgaatctcaccatcttcaccgcccgcctctactacttctgggatacagattaccaggaggggctccgcagcctgagtcaggaaggggcctccgtggagatcatgggctacaaagattttaaatattgttgggaaaactttgtgtacaatgatgatgagccattcaagccttggaaaggactaaaatacaactttctattcctggacagcaagctgcaggagattctcgagtgaggggtctccccgggcctcatggtctgtctcctctagcctcctgctcatgttgtgcaggcctcccctccatcctggaccagctgtgcttttgcctggtcatcctgagcccctcctggcctcagggccattccatagtgctcccctgcctcaccacctcctctccgctctcccaggctcttcctgcagaggcctctttctgcctccatggctatccatccacccaccaagaccctgttccctgagcctgcatgcccctaacctgccttttcccatctccccagcataacctaatattttttttttttttttgagacggaatttcgctctgtcacccagactggagtgcaatggcttgatcttggctcactgcaaactctgcctaccaggttcaagcgattctcctgcctccgcctcccgagtagctggaattacagacgcctgccaccacgcacagctaactttttttttttttgtatttttagtagtgactgggtttcaccatgttggccaggctggtcttgaactcctgacctcaggtgatccgcctatctcagcctcccaaagtgctgggattacaggcgtgagccactggcccggcggcacaaccaaatcttattaaactcaccctaggctggccgcggtgactcatgcctataatcccccagcaatttgggaggcagaggtgagagaatcgcttgagcccaggaattcgagaccagcctgggccacatgacaaagccccatctctacaaaaaaattacaaaaaaaaaaaaaacaggtgtggtggcatgcacctgtagttgaagctacttggaaggatgaagtgggaggattgcttgagccggggaggtggaggctgcagtgaactgagatcacgtcactgaactccagtctgagcaacagatcgagaccctgcctgaaaataaatcaataaataaactcaaccgaaatgggtatgaaagttgaaatgggtatgtaagttgaaaaccagaagttttgagaaacatcctttgttaactttcatcctacaaattgggtcattcatgtcctacgcagctaaaacagagcccaggagccagggaggaaaagcagtcaggccacacaccattgctcccaaaatggacttctctgcaagcctgactcctgaaactgtgcattgtaccctgaaaccagctttatccatagcttctgcaataaatggctgtaagtcttggaaaaaaaaaaaaaaaaaaaaaaaaaaaaaaaaaaaaaaaaaaa

SEQ ID NO: 391 - protein, 373 aa, Human
MKPHFRNTVERMYRDTFSYNFYNRPILSRRNTVWLCYEVKTKGPSRPRLDAKIFRGQVYSQPEHHAEMCFLSWFCGNQLPAYKCFQITWFVSWTPCPDCVAKLAEFLAEHPNVTLTISAARLYYYWERDYRRALCRLSQAGARVKIMDDEEFAYCWENFVYSEGQPFMPWYKFDDNYAFLHRTLKEILRNPMEAMYPHIFYFHFKNLRKAYGRNESWLCFTMEVVKHHSPVSWKRGVFRNQVDPETHCHAERCFLSWFCDDILSPNTNYEVTWYTSWSPCPECAGEVAEFLARHSNVNLTIFTARLYYFWDTDYQEGLRSLSQEGASVEIMGYKDFKYCWENFVYNDDEPFKPWKGLKYNFLFLDSKLQEILE

SEQ ID NO: 392 - DNA, 673 bp, Human
atgctgctcctgttcctcctcttcgagggtctctgctgtcctggggaaaatacagcagtgaagccagaggcctggctgtcctgtggccccagtcctggccctggccgtctgcagcttgtgtgccatgtctcaggattctaccccaagcccgtgtgggtgatgtggatgcggggtggatattccatctttctcatcctgatctgtttgactgtgatagttaccctggtcatattggttgtagttgactcacggttaaaaaaacagagccctgtctttctcatgggagccaacactcaggacaccaagaattcaagacatcagttctgcttggcacaagtatcgtggatcaaaaacagagtattgaagaagtggaagacacgcctaaaccaactctggtgacatttgctttaccttatacataaaatccttgtctgcatcttcttaaacaccgtccatgtcccataagggaagcatgcttttatttaaacagtttatactagcaaagatactgacccctttaggaatactttttccccatcttccagagattttttttttcctgctttggctacatatccatcattgtttatttttgaaactataatccagatacttctttttcatggattcccgagatcacccaattgatagctcttctgtactccccaaattg

SEQ ID NO: 393 - DNA, 2280 bp, Human
gaaaaatgtgtgcaaagaaatgatggcccctgaggacagactctgggcgatcacagtcacctgtgaaggttttatgaagatgaaatctgatgaaaatgcaagccttcagcaaaccataaaaccctgtatcaaggttagagagaaggaaaagccttccttactgaagctctttcgggacaacacggccattccaacctctagtgactctacgtaggtgtaaacttttttgtgggcattcaaagaaacactcagcatccttcccataaatatatttattaacttctacaagcaatctaatttccttaattacaagcctaatttaatttccctttaagcctttttgttaattttctttggagatttttcacgtctttcatttatttatttggagacagagtctcgctctttttcatgtctttaattaattaattaatttattttgagacggagtcttcactgtgtcactcaggctggagtgcagtggcgcaatcacggctcactgcaacctctgcctcccaggtccaagtgattcttctgcctcagcctctcaagtagctggaattacaggcatgtgccaccacgccccgctaaattttgtatattttttagtagagacagggtttcaccatattggccaggctggtctcaaactcctgatctcaggtgatcccctgcctcagcctcctgaagtgttgggattacaggcatgagccaccgcgcccgaccttcatgtcttttaaaaagtttgccaaagtttgattgacaattaccaaagtctgatgagctattctaggcaaaattttttgctaaacgtccatccaatttagaaaccacaggaaagattgttttacgcctggtatcttatattcatttcaggatatccgagtaacatggggtccctttttaccccaaatatctctaataaagcacatttctattgtacctgtgttctaccatgatcttaggtatctccatttgtttttgtctctagactgcaattcctacatcctatatttgtattgttaatttttcatctctaagtgtatcaccaagatgaatgccaatatgctaccacctaactctggttataagtgctaacccaggttatccaccaatataataaaaagttcaaagtttcataatttaataaagagaatgtcccttagatgtcagatcaaaacatcttctaaactgtaagcttacttaatgatctctataaggatagaattcatctattgcatcatcttaaatatttactaccctgccaatgctaatcctccacaccccaaaacacagagcttttagcactcaatatacagaacaatgttttgtatacggtacacaatgctcaatacacatttgttggatgaaataatattttatattttctaaatgctaaacctataccacgtaagaatataacacacgtttgctaggcttaaaatcattaattaaaatgccattttctactgattttggtaaaggaaaatgaaatactaacctacatgttgaagtgtttgctttagaacaacaatgcaatttagccccatcgaggcctgtagagggaggagggtgtacagtgactccagggtgaacagattgtgagctttcaagaaaacattgccaaagaggatcttgaggcaagggctgggtcttacaaccctcgatgagaccatcaacaatctccatttccgttttcttggacatcaggattctcttgcaggcattttggcaagcatggtcttcagctctgtcacagcaatataaacctacattttcagaatataagtggcttaattagctgttttttttgtttgtttttattgtactttaagttctgggatacatgtgcagaatgtgcagatttgttacataggtatacacatgccatggtggtttgctgaacccatcaacctgtcatctacattaggtatttctcctaatgctatccctcccctagcccccaactccctgacaggccctggtgtgtgatgttcccctccctgtgtccatgtgttctcatagttcaactcccacttatgagtgagaacatgcagtattttgttttctgttcttgtgttagtttgctgagaatgatggtttccagcttcatccatgtccctgcaaaggacatgaactcatccttttttatggctgcatagtattccacggtgtagatgtgccacattttctttattcagtctgtcactgatgggcatttgggttggttctaagtctttgctactgtgaatagtgctgcaataaacatatgtgtgcatg

SEQ ID NO: 394 - DNA, 5445 bp, Human
aagatggccgcggcgcgcacggctcctgcggcggggtagaggcggaggcggagtcgagtcactcccgcacttcggggctccggtgccccgcgccaggctgcagcttactgcccgccgcggccatgcggggctccgtgcacggatgagagaagccgctgccgcgctggtccctcctcccgcctttgccgtcacgcctgccgccgccatggaggagccgccgccaccgccgccgccgccaccaccgccaccggaacccgagaccgagtcagaacccgagtgctgcttggcggcgaggcaagagggcacattgggagattcagcttgcaagagtcctgaatctgatctagaagacttctccgatgaaacaaatacagagaatctttatggtacctctccccccagcacacctcgacagatgaaacgcatgtcaaccaaacatcagaggaataatgtggggaggccagccagtcggtctaatttgaaagaaaaaatgaatgcaccaaatcagcctccacataaagacactggaaaaacagtggagaatgtggaagaatacagctataagcaggagaaaaagatccgagcagctcttagaacaacagagcgtgatcataaaaaaaatgtacagtgctcattcatgttagactcagtgggtggatctttgccaaaaaaatcaattccagatgtggatctcaataagccttacctcagccttggctgtagcaatgctaagcttccagtatctgtgcccatgcctatagccagacctgcacgccagacttctaggactgactgtccagcagatcgtttaaagttttttgaaactttacgacttttgctaaagcttacctcagtctcaaagaaaaaagacagggagcaaagaggacaagaaaatacgtctggtttctggcttaaccgatctaacgaactgatctggttagagctacaagcctggcatgcaggacggacaattaacgaccaggacttctttttatatacagcccgtcaagccatcccagatattattaatgaaatccttactttcaaagtcgactatgggagcttcgcctttgttagagatagagctggttttaatggtacttcagtagaagggcagtgcaaagccactcctggaacaaagattgtaggttactcaacacatcatgagcatctccaacgccagagggtctcatttgagcaggtaaaacggataatggagctgctagagtacatagaagcactttatccatcattgcaggctcttcagaaggactatgaaaaatatgctgcaaaagacttccaggacagggtgcaggcactctgtttgtggttaaacatcacaaaagacttaaatcagaaattaaggattatgggcactgttttgggcatcaagaatttatcagacattggctggccagtgtttgaaatcccttcccctcgaccatccaaaggtaatgagccggagtatgagggtgatgacacagaaggagaattaaaggagttggaaagtagtacggatgagagtgaagaagaacaaatctctgatcctagggtaccggaaatcagacagcccatagataacagcttcgacatccagtcgcgggactgcatatccaagaagcttgagaggctcgaatctgaggatgattctcttggctggggagcaccagactggagcacagaagcaggctttagtagacattgtctgacttctatttatagaccatttgtagacaaagcactgaagcagatggggttaagaaagttaattttaagacttcacaagctaatggatggttccttgcaaagggcacgtatagcattggtaaagaacgatcgtccagtggagttttctgaatttccagatcccatgtggggttcagattatgtgcagttgtcaaggacaccaccttcatctgaggagaaatgcagtgctgtgtcgtgggaggagctgaaggccatggatttaccttcattcgaacctgccttcctagttctctgccgagtccttctgaatgtcatacatgagtgtctgaagttaagattggagcagagacctgctggagaaccatctctcttgagtattaagcagctggtgagagagtgtaaggaggtcctgaagggcggcctgctgatgaagcagtactaccagttcatgctgcaggaggttctggaggacttggagaagcccgactgcaacattgacgcttttgaagaggatctacataaaatgcttatggtgtattttgattacatgagaagctggatccaaatgctacagcaattacctcaagcatcgcatagtttaaaaaatctgttagaagaagaatggaatttcaccaaagaaataactcattacatacggggaggagaagcacaggccgggaagcttttctgtgacattgcaggaatgctgctgaaatctacaggaagttttttagaatttggcttacaggagagctgtgctgaattttggactagtgcggatgacagcagtgcttccgacgaaatcatcaggtctgttatagagatcagtcgagccctgaaggagctcttccatgaagccagagaaagggcttccaaagcacttggatttgctaaaatgttgagaaaggacctggaaatagcagcagaattcaggctttcagccccagttagagacctcctggatgttctgaaatcaaaacagtatgtcaaggtgcaaattcctgggttagaaaacttgcaaatgtttgttccagacactcttgctgaggagaagagtattattttgcagttactcaatgcagctgcaggaaaggactgttcaaaagattcagatgacgtactcatcgatgcctatctgcttctgaccaagcacggtgatcgagcccgtgattcagaggacagctggggcacctgggaggcacagcctgtcaaagtcgtgcctcaggtggagactgttgacaccctgagaagcatgcaggtggataatcttttactagttgtcatgcagtctgcgcatctcacaattcagagaaaagctttccagcagtccattgagggacttatgactctgtgccaggagcagacatccagtcagccggtcatcgccaaagctttgcagcagctgaagaatgatgcattggagctatgcaacaggataagcaatgccattgaccgcgtggaccacatgttcacatcagaatttgatgctgaggttgatgaatctgaatctgtcaccttgcaacagtactaccgagaagcaatgattcaggggtacaattttggatttgagtatcataaagaagttgttcgtttgatgtctggggagtttagacagaagataggagacaaatatataagctttgcccggaagtggatgaattatgtcctgactaaatgtgagagtggtagaggtacaagacccaggtgggcgactcaaggatttgattttctacaagcaattgaacctgcctttatttcagctttaccagaagatgacttcttgagtttacaagccttgatgaatgaatgcattggccatgtcataggaaaaccacacagtcctgttacaggtttgtaccttgccattcatcggaacagcccccgtcctatgaaggtacctcgatgccatagtgaccctcctaacccacacctcattatccccactccagagggattcagcactcggagcatgccttccgacgcgcggagccatggcagccctgctgctgctgctgctgctgctgctgctgttgctgccagtcggcccagcccctctggtggtgactctgtgctgcccaaatccatcagcagtgcccatgataccaggggttccagcgttcctgaaaatgatcgattggcttccatagctgctgaattgcagtttaggtccctgagtcgtcactcaagccccacggaggagcgagatgaaccagcatatccaagaggagattcaagtgggtccacaagaagaagttgggaacttcggacactaatcagccagagtaaagatactgcttctaaactaggacccatagaagctatccagaagtcagtccgattgtttgaagaaaagaggtaccgagaaatgaggagaaagaatatcattggtcaagtttgtgatacgcctaagtcctatgataatgttatgcacgttggcttgaggaaggtgaccttcaaatggcaaagaggaaacaaaattggagaaggccagtatgggaaggtgtacacctgcatcagcgtcgacaccggggagctgatggccatgaaagagattcgatttcaacctaatgaccataagactatcaaggaaactgcagacgaattgaaaatattcgaaggcatcaaacaccccaatctggttcggtattttggtgtggagctccatagagaagaaatgtacatcttcatggagtactgcgatgaggggactttagaagaggtgtcaaggctgggacttcaggaacatgtgattaggctgtattcaaagcagatcaccattgcgatcaacgtcctccatgagcatggcatagtccaccgtgacattaaaggtgccaatatcttccttacctcatctggattaatcaaactgggagattttggatgttcagtaaagctcaaaaacaatgcccagaccatgcctggtgaagtgaacagcaccctggggacagcagcatacatggcacctgaagtcatcactcgtgccaaaggagagggccatgggcgtgcggccgacatctggagtctggggtgtgttgtcatagagatggtgactggcaagaggccttggcatgagtatgagcacaactttcaaattatgtataaagtggggatgggacataagccaccaatccctgaaagattaagccctgaaggaaaggacttcctttctcactgccttgagagtgacccaaagatgagatggaccgccagccagctcctcgaccattcgtttgtcaaggtttgcacagatgaagaatgaagcctagtagaatatggacttggaaaattctcttaatcactactgtatgtaatatttacataaagactgtgctgagaagcagtataagcctttttaaccttccaagactgaagactgcacaggtgacaagcgtcacttctcctgctgctcctgtttgtctgatgtggcaaaaggccctctggagggctggtggccacgaggttaaagaagctgcatgttaagtgccattactactgtacacggaccatcgcctctgtctcctccgtgtctcgcgcgactgagaaccgtgacatcagcgtagtgttttgacctttctaggttcaaaagaagttgtagtgttatcaggcgtcccataccttgtttttaatctcctgtttgttgagtgcactgactgtgaaacctttaccttttttgttgttgttggcaagctgcaggtttgtaatgcaaaaggctgattactgaaatttaagaaaaaggtt

SEQ ID NO: 395 - protein, 1607 aa, Human
MREAAAALVPPPAFAVTPAAAMEEPPPPPPPPPPPPEPETESEPECCLAARQEGTLGDSACKSPESDLEDFSDETNTENLYGTSPPSTPRQMKRMSTKHQRNNVGRPASRSNLKEKMNAPNQPPHKDTGKTVENVEEYSYKQEKKIRAALRTTERDHKKNVQCSFMLDSVGGSLPKKSIPDVDLNKPYLSLGCSNAKLPVSVPMPIARPARQTSRTDCPADRLKFFETLRLLLKLTSVSKKKDREQRGQENTSGFWLNRSNELIWLELQAWHAGRTINDQDFFLYTARQAIPDIINEILTFKVDYGSFAFVRDRAGFNGTSVEGQCKATPGTKIVGYSTHHEHLQRQRVSFEQVKRIMELLEYIEALYPSLQALQKDYEKYAAKDFQDRVQALCLWLNITKDLNQKLRIMGTVLGIKNLSDIGWPVFEIPSPRPSKGNEPEYEGDDTEGELKELESSTDESEEEQISDPRVPEIRQPIDNSFDIQSRDCISKKLERLESEDDSLGWGAPDWSTEAGFSRHCLTSIYRPFVDKALKQMGLRKLILRLHKLMDGSLQRARIALVKNDRPVEFSEFPDPMWGSDYVQLSRTPPSSEEKCSAVSWEELKAMDLPSFEPAFLVLCRVLLNVIHECLKLRLEQRPAGEPSLLSIKQLVRECKEVLKGGLLMKQYYQFMLQEVLEDLEKPDCNIDAFEEDLHKMLMVYFDYMRSWIQMLQQLPQASHSLKNLLEEEWNFTKEITHYIRGGEAQAGKLFCDIAGMLLKSTGSFLEFGLQESCAEFWTSADDSSASDEIIRSVIEISRALKELFHEARERASKALGFAKMLRKDLEIAAEFRLSAPVRDLLDVLKSKQYVKVQIPGLENLQMFVPDTLAEEKSIILQLLNAAAGKDCSKDSDDVLIDAYLLLTKHGDRARDSEDSWGTWEAQPVKVVPQVETVDTLRSMQVDNLLLVVMQSAHLTIQRKAFQQSIEGLMTLCQEQTSSQPVIAKALQQLKNDALELCNRISNAIDRVDHMFTSEFDAEVDESESVTLQQYYREAMIQGYNFGFEYHKEVVRLMSGEFRQKIGDKYISFARKWMNYVLTKCESGRGTRPRWATQGFDFLQAIEPAFISALPEDDFLSLQALMNECIGHVIGKPHSPVTGLYLAIHRNSPRPMKVPRCHSDPPNPHLIIPTPEGFSTRSMPSDARSHGSPAAAAAAAAAVAASRPSPSGGDSVLPKSISSAHDTRGSSVPENDRLASIAAELQFRSLSRHSSPTEERDEPAYPRGDSSGSTRRSWELRTLISQSKDTASKLGPIEAIQKSVRLFEEKRYREMRRKNIIGQVCDTPKSYDNVMHVGLRKVTFKWQRGNKIGEGQYGKVYTCISVDTGELMAMKEIRFQPNDHKTIKETADELKIFEGIKHPNLVRYFGVELHREEMYIFMEYCDEGTLEEVSRLGLQEHVIRLYSKQITIAINVLHEHGIVHRDIKGANIFLTSSGLIKLGDFGCSVKLKNNAQTMPGEVNSTLGTAAYMAPEVITRAKGEGHGRAADIWSLGCVVIEMVTGKRPWHEYEHNFQIMYKVGMGHKPPIPERLSPEGKDFLSHCLESDPKMRWTASQLLDHSFVKVCTDEE

SEQ ID NO: 396 - DNA, 318 bp, Human
atgtcagacgcagccgtagacaccagctccgaaatcaccaccgaggacttaaaggagaagaaggaagttgtggaagaggcggaaaatggaagagacgcccctgctcacgggaatgctaatgaggaaaatggggagccggaggctgacaacgaggtagatgaagaagaggaagaaggtggggaggaagaaggtgatggtgaggaagaggatggagatgaagatgagggagctgagtcagctacgggcaagcgggcagctgaagatgatgaggatgacgatgtcgatacccagaagcagaagaccgacgaggatgactag

SEQ ID NO: 397 - protein, 105 aa, Human
MSDAAVDTSSEITTEDLKEKKEVVEEAENGRDAPAHGNANEENGEPEADNEVDEEEEEGGEEEGDGEEEDGDEDEGAESATGKRAAEDDEDDDVDTQKQKTDEDD

SEQ ID NO: 398 - DNA, 1834 bp, Human
ggaggcacagataaagataagttttactgtcacgctgcttttaacataacagagcaacatcacctaggaaaaaagtttgtaggaggatttttaatccatatatttgtcttatggctagataaagatttctctgaaaaaaagaagcatgtcaggaatctctgggtgcccctttttcctctggggacttctagcattgttgggcttggctttggttatatcactgatcttcaatatttcccactatgtggaaaagcaacgacaagataaaatgtacagctactccagtgaccacaccagggttgatgagtattatattgaagacacaccaatttatggtaacttagatgatatgatttcagaaccaatggatgaaaattgctatgaacaaatgaaagcccgaccagagaaatctgtaaataagatgcaggaagccaccccatctgcacaggcaaccaatgaaacacagatgtgctacgcctcacttgatcacagcgttaaggggaagcgtagaaagcccaggaaacagaatactcatttctcagacaaggatggagatgagcaactacatgcaatagatgccagcgtttctaagaccaccttagtagacagtttctccccagaaagccaggcagtagaggaaacattcatgatgatcccatcagactgtttggattgatccgtgctaagagagaacctataaactagctggaccatgatctagttcaatgatttggctcctattgaagatggcttctaagaaaacaagatgcacagaggacacagaaggacttggcagcagggtgatgacctgatcatttgttgatgggatggtggcttacctcttattcacagcttacacttatgcatgccaaatgtaaggccatgaaaatcagtatttcaaataccttaaaaaatgctttactactaaaatgtaaaaaattaatgtgctcacctcggcagcacatatactaaaaattaataagacccagcttgaaaattgagcctgataacaagattacaaattcacaatacctaatacttagggaagtataaaaatttaagcatgaatgcgttctggaacacgttagaagaaaaataaaagccaatgagtttttttttaattctcctttctcaccaatgggcaatagcccataattgaaataaatttctgattgaaaggtataggaaacattaaaatgcattactaagagaagtaatataattttcttacaaagtatttttcccaaagatagctttactatttcaaaaattgtcaaattaatgcatgctccttacaacaaacaaatatcaaaaagagtttaggaattctactagccagagatagtcacttggagaaactttctatatatccttctaaatatttttctgggcatgcttatgtatgtacatcagttgtttctttttattttgaaccaaaaatgtggtttcttttgtacacattacttaaactttctttccagtcaaccatatattgtggatttattttcactgttatatttaactatatataaatacgcatatattgtaattttaatgtctgcttagcaccccactgataaccaaatcacagtttatttaaataattttaatgacttttcaaaaacaatttattgatgcaaaaagcaaggttgagatgacaatgtttctttcaataattaaaaaatactgcttcactgtcttctctctgtttcatcagaaacacatactataatacttgtctctgtccttaagtgtgatacacgctatttttctgattgttaagactttccttattactggttctaatttgattataatatgccaaggtatggtc

SEQ ID NO: 399 - protein, 176 aa, Human
MSGISGCPFFLWGLLALLGLALVISLIFNISHYVEKQRQDKMYSYSSDHTRVDEYYIEDTPIYGNLDDMISEPMDENCYEQMKARPEKSVNKMQEATPSAQATNETQMCYASLDHSVKGKRRKPRKQNTHFSDKDGDEQLHAIDASVSKTTLVDSFSPESQAVEETFMMIPSDCLD

SEQ ID NO: 400 - DNA, 1682 bp, Human
atgctcagtcctccaggcgtcggtgctcagcggtgttggaacttcgttgcttgcttgcctgtgcgcgcgtgcgcggacatggcctcaaacgattatacccaacaagcaacccaaagctatggggcctaccccacccagcccgggcagggctattcccagcagagcagtcagccctacggacagcagagttacagtggttatagccagtccacggacacttcaggctatggccagagcagctattcttcttatggccagagccagaacacaggctatggaactcagtcaactccccagggatatggctcgactggcggctatggcagtagccagagctcccaatcgtcttacgggcagcagtcctcctaccctggctatggccagcagccagctcccagcagcacctcgggaagttacggtagcagttctcagagcagcagctatgggcagccccagagtgggagctacagccagcagcctagctatggtggacagcagcaaagctatggacagcagcaaagctataatccccctcagggctatggacagcagaaccagtacaacagcagcagtggtggtggaggtggaggtggaggtggaggtaactatggccaagatcaatcctccatgagtagtggtggtggcagtggtggcggttatggcaatcaagaccagagtggtggaggtggcagcggtggctatggacagcaggaccgtggaggccgcggcaggggtggcagtggtggcggcggcggcggcggcggtggtggttacaaccgcagcagtggtggctatgaacccagaggtcgtggaggtggccgtggaggcagaggtggcatgggcggaagtgaccgtggtggcttcaataaatttggtgtgttcaagaaggaagtgtatcttcatacatcaccacacctgaaagcagatgtgcttttccagactgatccaactgcagagatggcagctgagtcattgcctttctccttcgggacactgtccagctgggagctggaagcctggtatgaggacctgcaagaggtcctgtcttcagatgaaaatgggggtacctatgtttcacctcctggaaatgaagaggaagaatcaaaaatcttcaccactcttgaccctgcttctctggcttggctgactgaggaggagccagaaccagcagaggtcacaagcacctcccagagccctcactctccagattccagtcagagctccctggctcaggaggaagaggaggaagaccaagggagaaccaggaaacggaaacagagtggtcattccccagcccgggctggaaagcagcgcatgaaggagaaagaacaggagaatgaaaggaaagtggcacagctagctgaagagaatgaacggctcaagcaggaaatcgagcgcctgaccagggaagtagaggcgactcgccgagctctgattgaccgaatggtgaatctgcaccaagcatgaacaattgggagcatcagtcccccacttgggccacactacccacctttcccagaagtggctactgactaccctctcactagtgccaatgatgtgaccctcaatcccacatacgcagggggaaggcttggagtagacaaaaggaaaggtctcagcttgtatatagagattgtacatttatttattactgtccctatctattaaagtgactttctatg

SEQ ID NO: 401 - DNA, 3413 bp, Human; identical to SEQ ID NO: 108

SEQ ID NO: 402 - DNA, 3015 bp, Human
gcggaagtggagctaccgccaccgccgccgccgattccggagccggggtagtcgccgccgccgccgccgctgcagccactgcaggcaccgctgccgccgcctgagtagtgggcttaggaaggaagaggtcatctcgctcggagcttcgctcggaagggtctttgttccctgcagccctcccacgggaatgacaatggataaaagtgagctggtacagaaagccaaactcgctgagcaggctgagcgatatgatgatatggctgcagccatgaaggcagtcacagaacaggggcatgaactctccaacgaagagagaaatctgctctctgttgcctacaagaatgtggtaggcgcccgccgctcttcctggcgtgtcatctccagcattgagcagaaaacagagaggaatgagaagaagcagcagatgggcaaagagtaccgtgagaagatagaggcagaactgcaggacatctgcaatgatgttctggagctgttggacaaatatcttattcccaatgctacacaaccagaaagtaaggtgttctacttgaaaatgaaaggagattattttaggtatctttctgaagtggcatctggagacaacaaacaaaccactgtgtcgaactcccagcaggcttaccaggaagcatttgaaattagtaagaaagaaatgcagcctacacacccaattcgtcttggtctggcactaaatttctcagtcttttactatgagattctaaactctcctgaaaaggcctgtagcctggcaaaaacggcatttgatgaagcaattgctgaattggatacgctgaatgaagagtcttataaagacagcactctgatcatgcagttacttagggacaatctcactctgtggacatcggaaaaccagggagacgaaggagacgctggggagggagagaactaatgtttctcgtgctttgtgatctgttcagtgtcactctgtaccctcaacatatatcccttgtgcgataaaaaaaaaaaaaaaaaaaaaaagagaatcgtacgtcgactttcgatttttcacagcctcagcctaggaaaaatggttcatgggataaacagctggtatttgtatctaaaactcagattggtcacataaatgccacggcattccgaagttttgattttgattaacattgacaggattactgtgtgtttaattttttaaaaactgaacactgtgattatggggttttgtaatttagcagaactcttactggtagaaaaaatagacctgaattatgtgtaactttttggaaggtttaatctgatatcaaaataatcattgaaatacaattccattgtaaagttgtacagaaagttatagagattatattgtgatgctggaacttggagtgagacacacatcatttggcatttgagttgaatggtaattcacagtaatgctgccgttgttcgggacttaaagacacttgacctgtttgggctgttgccacttaaaagttcatgaccacaaatgtccacagtgtcttcctctgaggaaactcgaatcctgaaatggaaattctttgtggcagataactggcttatgacaccttgaaaagttcaagtgctcatataacacaccacactgaaccccctttcctacagcaatatgttcactatgttaccaatttgcaacttgtgcttcaatagtggaatctactttcattgttaacactgagctaaagaaaaaaagccgtgtgttttatgaatgaccttatctgtttcctggataatacctttaagaataatgtcctgagtcaggcgtggtggtgcgtgcatctagtcccaactatttgggaggctgaggcaggaggatcgcttgagcccaggagtttaaagctgcagtgccctgtggttgcacctgtgaataactgcactccagcctgggcaacatagcgagacctcatctccaaaaaagaaaacaaaaaacaaaaaaaggaatgatgttctgtagagatggcctttcacttgaggagtactcagttttcaggttcttcctagctcggggcttttaaattttgaaatctaaacattctttcccaccatcctttttgactgttgaccttggttttctcttctaagtttctgtccctctgcttccttactttttttcctttttgaattctatctttatctgtcttttgttcactttttaatgctatatatgggcaggggtgagagacattactgagcaccttggtgagcaagcctggctttaaagattggagaagagcttctggcaccagaaccctgtcttcctccagttctcaacacggtgttgctcttcagtcataccggaatctgaatcaaaaaagtatttttaaatatccatgatttctccctgtattgaggctagccctgatcatgctttttgtgcctgtcaccaggtctcccaagtgcactcatccaggtcagtgctcagatgtgtttaaggagaccctatattcagggaagttgcgtgaacactgcagtggggagaattgagaatagtcaggcctatcagtctcacagaatcacccctctacctttgatattccacttagctgtagagtccatctgtttgtccatctgctgaaatgagaaaagaaaaatttatgcactgatttaaaacaaaccaaaaaaaaagaaaaaaacaaaaaaaaaaatccctcctttctagctgaacaaaaatgtgcagttaatacttggcgcttgaaaatgcagtagtgaatgtggaaccaagcctgtctgtatatctggtagctcttttcttgctttgttttttcttaccagtattctgcctaacgtttgcttctgtgatggttatattgcctagcaagcacacccgtggttgtgaaaatagtatagcaaaaaagaaaaatccccggttattgatgtactagatttgtgtatgtcttttaaacagttctagtttcaccttacacagaataatcaggaaaagtgtaaaaattcaaaagtgaaataaaaattttatcagttaaaaaa

SEQ ID NO: 403 - protein, 246 aa, Human
MTMDKSELVQKAKLAEQAERYDDMAAAMKAVTEQGHELSNEERNLLSVAYKNVVGARRSSWRVISSIEQKTERNEKKQQMGKEYREKIEAELQDICNDVLELLDKYLIPNATQPESKVFYLKMKGDYFRYLSEVASGDNKQTTVSNSQQAYQEAFEISKKEMQPTHPIRLGLALNFSVFYYEILNSPEKACSLAKTAFDEAIAELDTLNEESYKDSTLIMQLLRDNLTLWTSENQGDEGDAGEGEN

SEQ ID NO: 404 - DNA, 7869 bp, Human
gaggccaagaattcggcacgtgggatggcggacagtgcggaactaaagcaaatggttatgagccttagagtttctgaactccaagtactgttgggctacgccgggagaaacaagcacggacgcaaacacgaacttctcacaaaagccctgcatttgctaaaggctggctgtagtcctgctgtgcaaatgaaaattaaggaactctataggcggcggttcccacagaaaatcatgacgcctgcagacttgtccatccccaacgtacattcaagtcctatgccagcaactttgtctccatctaccattccacaactcacttacgatggtcaccctgcatcatcgccattactccctgtttctcttctgggacctaaacatgaactggaactcccacatcttacatcagctcttcacccagtccatccggatataaaacttcaaaaattaccattttatgatttactggatgaactgataaaacccaccagtctagcatcagacaacagtcagcgctttcgagaaacctgttttgcatttgccttgacaccacaacaagtgcagcaaatcagtagttccatggatatttctgggaccaaatgtgacttcacagtacaggtccagttaaggttttgtttatcagaaaccagttgtccacaagaagatcacttcccacccaatctttgtgtgaaagtgaatacaaaaccttgcagccttccaggttaccttccacctacaaaaaatggcgtggaaccaaagcgacccagccgaccaattaatatcacctcacttgtccgactgtccacaacagtaccaaacacgattgttgtttcttggactgcagaaattggaagaaactattccatggcagtatatcttgtaaaacagttgtcctcaacagttcttcttcagaggttacgagcaaagggaataaggaatccggatcattctagagctttaattaaagagaagttgactgcggatccagacagtgaaatagctacaaccagcctaagggtttctctactatgtccacttggtaaaatgcggctgacaattccgtgtcgggcccttacatgttctcatctacaatgttttgacgcaactctttacattcagatgaatgagaaaaaaccaacctgggtttgtcctgtctgtgataagaaggctccatatgaacaccttattattgatggcttgtttatggaaatcctaaagtactgtacagactgtgatgaaatacaatttaaggaggatggcacttgggcaccgatgagatcaaaaaaggaagtacaggaagtttctgcctcttacaatggagtcgatggatgcttgagctccacattggagcatcaggtagcgtctcaccaccagtcctcaaataaaaacaagaaagtagaagtgattgacctaaccatagacagttcatctgatgaagaggaagaagagccatctgccaagaggacctgtccttccctatctcccacatcaccactaaataataaaggcattttaagtcttccacatcaagcatctccagtatcccgcaccccaagccttcctgctgtagacacaagctacattaatacctccctcatccaagactataggcatcctttccacatgacacccatgccttacgacttacaaggattagatttctttcctttcttatcaggagacaatcagcattacaacacctccttgcttgccgctgcagcagcagcagtttcagatgatcaagacctcctacactcgtctcggtttttcccgtatacctcctcacagatgtttcttgatcagttaagtgcaggaggcagtacttctctgccaaccaccaatggaagcagtagtggcagtaacagcagcctggtttcttccaacagcctaagggaaagccatagccacaccgtcacaaacaggagcagcacggacacggcatccatctttggcatcataccagacattatttcattggactgattcccaggccctgctgctcccatccccaccccagatcgaatgaacttggcagaaagaagagaactttgtgctctgttttaccttactctgtttagaaaagtatacaagcgtgttttttttcctttttttagggaaaaaattaaaagaaatgtacagagaacaaaactatattttcagttttacttttgtatataaatctaagactgcctgtgtgataaaacacttgtttaaaaaaaaaaaggaaagaaaagaaaaaagaaaaacaagcacccacaaaccaccttcagttcatttttttctggattctgaagatttttcattatttgtcctatggttttggttttatttgacttcgatggcattattttatttgcaataacagaaaaggaattgcatgtatgaagttttcaatcgtgggcttttctttgttgtggggagggggtcgggggatagtttgatttccattttctgaaaacgacagacttggattctgtttgtgtgtgcatattttatccagccttaagttataaagctcatctgtcccgctgcattccctgtgtattttcaggacatggctcgtgggtgtgtgtgttcattgtgtgcgtctgtatgtatttttctgtcatcactgttccctctcctcccgagtgtgcattcagttaatataatcagttgcttgcttctttcaaagtgctttgaaggtcttgaactcatgtgtgagcatctttatcaactatcccaattgcatgttctccatcacatattctcttatttgctctgtaccccctgagaatatgttttagagatattggaataaagctgtctgggtaaggagtaggcttagccgacctatgaataatacactttagtctagttctttattctaaatctggattgccagtattgtgtatttaaaccaagtctgtgaatacctgctttttttggccacagagtaacaagttttcatgtaagatcttcataccaaagtaggaagtaaaaatagcttagaaagctctgtcaggtgttttgtgcagctgacagaggtaatgttacatcacctaaaaaagaaagatacacggtcagttatcctaaaaataaattgtttggaaagtacaatgcaccacatttttgtagaagtctactatttgataaacagttgaaattcaagatgtgtttgacccttagtcatttttactctttggttctgagtatacctattttcttagcgtatctgccttgtttatctttttcttcaccttttaacaagtatgacataggaaagtcatttttttttagaattcatggatcagtctgatctactcttattcataatggaacatgtaaatatactgaaaactgtttttcaggagagaaatatgagttggagggaaggaaaagtggttctacttatgttccaaaatcctcatcagagaaggtatgatgttctcaggtgtggaaaatattttttagttgattgagaatgcaggtttaacagaagagataaggggcataatgactgctggttttccagactggattttcctaccgcaactattaatgttctcagagttgatgaggaccacctttgtgtatacacttgtagttttaaaccttgcattggtaacaaaatgatcaactttaatccaggtagaattcaagatggctgtacttcagttgtatgataaaattaatggttctcatgacttgtgtggcatctaaaaataatgtttttatagcatctctctgccactaaattgttgacttgaattttgggaaaaaaaaaagttggtgttgatatgtatatgtgtgtgtgtatatatgtatttataaacaagtgtgtttgagtaacaagtgagtttcatagtcttcccctacgcatgtgtattccacacacaaatggctgagttatagtcataaaacaatttgcaataaaaaaaaaaccaaaacagattgtcagttaaccaggaaacagttaatgttttttaatgaatctggcattatagtgagcaaatgtcgtattaatttaggctaatttctaatactaccataatttgtgtctaaatttctgttggggtagaaattactaaaattgtggggagttttttctgatttttacattgctttaggaaacatttttactaattcagctgtcttaggtaaaatgaatagttttcttcctgtttttttatgtgtcattgttagtggtctcagaattctgatcagtaactttgtgtatgatgctgaattacaaaccgtttgaatgatccagttgaaaacgtatccctctactttcttcagttgtagaaaaggttaatttccctcagtgtcccacattataccaacctaagagaagaacaggtaatagggagaaataaacatacggtggtttcagtggttttggtcatgtgtccacaggagaaactaaccattcagttgtcttaattttagttcgttctaccctgtgaggagtttgtttccatcagttgttgactttccaaaatgttgcattaagtaatagttgtcactctgttggtctcatggtcaatatcaatcagactttcatgatctctactaattattagtagagtcctgtactatgtctgtaactactaagtttaaagaaaagcacatagtcacttcatctctttttttcttagcctacgctcactccccaacccatcccaacattgacatgctatctgtggacaaatagcagttctcagaatctagtcaagttgccatcatcccccttgccttggccgttcatagtaggtatgcatatgtttgtttctgtacagtactgtgtgtgtgtgtgtatatatatatacatctgtatgcacacatctttgataaaatagctatttgactagcagggttaaagtggcttttaattacttcgtgagtgttattggatacatcttaaaaaaaaaaaatctgaaccagaaccatgccatacttggttgactattttgagcattaaaattgctttactaattatttagacatgatcacaattctgtatctttactgaggaaagattcacgtaagctctgaaaaatcggattctttggcagattttcctttgagtcaagtgtctgaaatggagtgaaaatatatcctaactaaattaatgtggaaagagcatttttttagacaatttcaattttaaacacataaaactttcaagatcttcaggactttttaaagcacatttgaaattattttagtaagaattttgttttatcaatagatgttgaattctgttttttaattaaatacaaagcttagatttcagaaagagagggaaaatagctggtggtcccagagtgtgctgctgttaattgtttaacaaaggggaaaatgtacataaacagataaagttaccataaattccatgaacttaaatctgtgattcattgccttaaaactttctctcttagaatttccataccgcatgccaaaccagtaaaatggcttttaaaaatgtatagtagacaatgtcagtttgtataaaagtaccaagtgaaaatatttattacatgcattggaaaaaaattgtttacctattgaatgttacctgtttatgtagagctctttagatgtaataaaagaaaagccttcagttaatttgtcttctgtaaaataacactgctggatgttcaaggggacaatccctatgagacaagtgataatggtttgtgcttccaaagcacctttcatccagagatttcaaagcatgacaagtaactaactaattttcttgcagcatgctttgaggtaagtaatgaatatagccatcatttccctttcttgttgaaatatggctaactctttaataaatcacagcatctgtttagtatctgcagtttgaatgctaagagcaccgtggccttcttgtaaacaacactaggtgctagagaaaccagctggaatttcaggaatgagcttgaaaccaggaccaggagtaaggtaacagcccttcctcgggtagaggtttgaatcaaacacttaataggatcttagactctggaccactgaatcccttaatgagcagggagtccgtgaagaggagccccaggttctaatgaccattccacaccaactgtgtgtttttggcaagttatatttcagattcctgttaggcaaatgagattcataaaacttgctttaaaaccatactgggactattcagtgataaatatagacatagaaaagctttgacggaaagtaccctcatttattatatccagaacttgctcttcctgtgccatctaaatcattggtatctatctcccatctaatctttggtattccaggttggctgtgcaggatttacttcctaatgtccatgactggagctcaaaagaactgtgggcctaggacctttgagctttgcctgaaagtgacagcagttctctcggcggggccagcatctaaccggccctctggtggatttaccatgaaggtaatgaagtttaagcaccaggacccttcacttgttctggtcctaggagcagccccagaaattctgcatttctgtttttgtattcttaaggcagccaaatctcgtaaacctcagaccccacaaaacatctgctcctacactgtgtggacctgggcttcccagccagatggtcacaacttcacctagttggcatttgggccatttatttaccctcaccccacaaaactctttggctcctaggaattcctcctctccttgcagttatgcttggggaaatgagagtctccttcctcagggccttgtttgggtctgaagccacacagcatcgttgagacagttgcactaacactacaactcttgttccctgcagttttccctgtgcccggtgcctagtgaaagatttgtgtcttgtacatcctcccaaaagacacatcccatttgatttggttttcttctactttagccactgtggtactactagacaaagccacagcccagagaacccacttttgatacatacatggatgcaaatctttgtacttgaagccctgcacccctacctgtgttggtgtggtactccagcccttttaggactgtgctggcactacgaatgatccagatttgacaagtgtatggcacctctgaatctctggcagcaccaacctggcaccttctagctgtgtaactcactcaaagccactccagctggatggactcccagaaagcctagtgctcctactactgttttccagggctgttgtaccctggccattgctggttacatccccttatttctctccgtaagtcctggggaggtggcttaaggcaatgaccagtgtgggccacttgagcagaccatcccggaacctctctgcctgttaacagagcccagggaacagctcggaattctcacagcattggaagcccccttcttgagctctgcaaggccagtcaatttagcagctcacatctggtttcctttggtgtggggtgtaaagtagatcgctcttcctgctctcagctgatgctgcctcattgtagcatgtgttttcactctagtgttttcactctacactctgtgtttatgaatgaatagcctgagctatgtcactatatctgttgagatggaaatgagaatttgtaaatgggcctctggcactgcaagaattgttgtcataagtgttacagctttctgttcattgctgcttctcagctagcactggcttcatcttggaaaatcttggaaatatggaagatggttctagcccccaaatacagaataagtctcttggtagattgcccttaagtcatcagctcaatccttcctcaacaggctccatgaggtaagaagtgggaatccagcttgtgtgggggggctttgaggagtgaaatgatttgcccaaagtcacagtgggaagcagcag

SEQ ID NO: 405 - DNA, 2219 bp, Human
ggcaggtgttgaggggctcccggtccggctgccgccgctcccccgctccggacccggggctccccctagcgccgctgaggagccgcctctgcggctccaggagggcgcaggagcgggactgagagcgcctggaggctcgagcggagggtaattcatttgcacacctgttagcaagaaacagaagttgaaggactggaacaagtgaactaggaaagagggaacgccaatccaaggatagaaggacaaggacagaatcaccagcactggctgaaggcctcctgtttcctgcgctttctccttttcctgtgaaatctccgaggagaagaaagaatgatggacagtttatcctttcactgccacaaggcctgtttacttggcagtaggtccttaagttccttgcttttttgctgctgtttggtgactggaagaggcaccagagactctcactctggggaggtttgctggcatgggtaatctcattaaggtgctaaccagggacatagaccacaatgcagcacattttttcttggactttgaaagtaccttaacatggggaatcttcttaaagttttgacatgcacagaccttgagcaggggccaaattttttccttgattttgaaaatgcccagcctacagagtctgagaaggaaatttataatcaggtgaatgtagtattaaaagatgcagaaggcatcttggaggacttgcagtcatacagaggagctggccacgaaatacgagaggcaatccagcatccagcagatgagaagttgcaagagaaggcatggggtgcagttgttccactagtaggcaaattaaagaaattttacgaattttctcagaggttagaagcagcattaagaggtcttctgggagccttaacaagtaccccatattctcccacccagcatctagagcgagagcaggctcttgctaaacagtttgcagaaattcttcatttcacactccggtttgatgaactcaagatgacaaatcctgccatacagaatgatttcagctattatagaagaacattgagtcgtatgaggattaacaatgtaccggcagaaggagaaaatgaagtaaataatgaattggcaaatcgaatgtctttgttttatgctgaggcaactccaatgctgaaaaccttgagtgatgccacaacaaaatttgtatcagagaataaaaatttaccaatagaaaataccacagattgtttaagcacaatggctagtgtatgcagagtcatgctggaaacaccggaatacagaagcagatttacaaatgaagagacagtgtcattctgcttgagggtaatggtgggtgtcataatactctatgaccacgtacatccagtgggagcatttgctaaaacttccaaaattgatatgaaaggttgtatcaaagttcttaaggaccaacctcctaatagtgtggaaggtcttctaaatgctctcaggtacacaacaaaacatttgaatgatgagactacctccaagcaaattaaatccatgctgcaataacaattctggaataagcacctgctgtagacagaagacagtattctgcaatgactgagaatgcagttttttagtgattgcaattactatctcatttattcttgcttttatttctttcctctgttcctcttccctcttttttaatcatgttcttaagacttcttttctgtgccaaaatcagtaaagttacactctgaagggatatcatcctttcaaacgggccatctaaggcagctaattatgcattgcattggggtctctactgagaaaaattctgtgacttgaactaaatatttttaaatgtggattttttttgaaactaatatttaatattgcttctcctgcatggcaaaactgcctattctgctatttaaaaaccctcaatgactttattttctactgccgcctttttcatgtgcaaccaaaatgaaaatgtttaaattaactgtgttgtacaaatggtacccaacacaaactttttttaaattagtaatacttttgtttaaagttttaagtttgcattttgactttttttgtaaggatgtatgttgtgtgtttaacctttattaactaacgttaaaagctgtgatgtgtgcgtagaatattacgtatgcatgttcatgtctaaagaatggctgttgatgataaaataaaaatcagctttcatttttctaaaaaaaaaaaaaaaaaaaaaaaaa

SEQ ID NO: 406 - DNA, 1298 bp, Human
ctctgctccggtgcaggcccgcagggcgccctgggctgggagcaacgcgactgaccgtggtcgtgggcggacggcggctgcagcgtggaggagctggggtcgctgtgggtcgcgaagcagagcccgggacgtgcgcgcttggtgcacgatcctgaaggggagctccgaggggcccgggtcgccagggctgctgcggccattcccggagcccggcgcggggcccgcgagatactggtttaggccgtcccagggctccgggcgcacccggtggccgctgctgcagcggagggagcgcggcggcgcgggggctcggagacagcgtttctcccggaagtcttcctcgggcagcaggtgggaagtgggagccggagcggcagctggcagcgttctctccgcaggtcggcaccatgcgccctgcagccctgcgcggggccctgctgggctgcctctgcctggcgttgctttgcctgggcggtgcggacaagcgcctgcgtgacaaccatgagtggaaaaaactaattatggttcagcactggcctgagacagtatgcgagaaaattcaaaacgactgtagagaccctccggattactggacaatacatggactatggcccgataaaagtgaaggatgtaatagatcgtggcccttcaatttagaagagattaaggatcttttgccagaaatgagggcatactggcctgacgtaattcactcgtttcccaatcgcagccgcttctggaagcatgagtgggaaaagcatgggacctgcgccgcccaggtggatgcgctcaactcccagaagaagtactttggcagaagcctggaactctacagggagctggacctcaacagtgtgcttctaaaattggggataaaaccatccatcaattactaccaagttgcagattttaaagatgcccttgccagagtatatggagtgatacccaaaatccagtgccttccaccaagccaggatgaggaagtacagacaattggtcagatagaactgtgcctcactaagcaagaccagcagctgcaaaactgcaccgagccgggggagcagccgtcccccaagcaggaagtctggctggcaaatggggccgccgagagccggggtctgagagtctgtgaagatggcccagtcttctatcccccacctaaaaagaccaagcattgatgcccaagttttggaaatattctgttttaaaaagcaagagaaattcacaaactgcagctttctaaaaaacaaaaaaaaaaaaaaaaaaaaaaaaaaaaaaaaaaaaaaaaaaaaaaaaaa

SEQ ID NO: 407 - DNA, 2387 bp, Human
gccaaggcgagtgccgcgcgggccaccatggccacggacgagctggccaccaagctgagccggcggctgcagatggagggcgagggcggcggcgagaccccggagcagcccgggctgaacggggcagcggcggcggcggcgggggcacccgacgaggcggccgaggcgctgggcagcgcggactgcgagctgagcgccaagctgctgcggcgcgcagacctcaaccagggcatcggcgagccccagtcgcccagccgccgcgtcttcaacccctacaccgagttcaaggagttctccaggaagcagatcaaggacatggagaagatgttcaagcagtatgatgccgggcgggacggcttcatcgacctgatggagctaaaactcatgatggagaaacttggggcccctcagacccacctgggcctgaaaaacatgatcaaggaggtggatgaggactttgacagcaagctgagcttccgggagttcctcctgatcttccgcaaggcggcggccggggagcttcaggaggacagcgggctgtgcgtgctggcccgcctctctgagatcgacgtctccagtgagggtgtcaagggggccaagagcttctttgaggccaaggtccaggccatcaacgtgtccagccgcttcgaggaggagatcaaggcagagcaggaggaaaggaagaagcaggcggaggagatgaagcagcggaaagcggccttcaaggagctgcagtccacctttaagtagcgggggctgcagccgaccgccctgctctggccccagtgtggtgggcgagggtggcgcatgggaggccgagcctgaatccttgcctgtgtctgacgggaccactactaaaaacctaaaaatatctgtgaatggagcaagttcaggggtcttatggaggtggcccggcccctccccgctcccttccactctgcacgaggccgccacaccggcgctggctccctgcccggcccggccctccctggcaatccctgggctctcttgcacccctaactgccccctgcctgctccggcactgccccaggcccagctcctggccctaggtccctcccagccccatgtgcctgccgcctgccctccacacatccctgtccccccaacccgggaacccctgccctcctccagcaggccgcaccgcccctggggccccctgccagccccttcccaggctgggagacggcagaagagatagaatcagggctgcccccacagagtgggacccaaggggctaattggaggcacgaggggacccctccccagggccttttcctcctctgcgtcttccatctactgaaatgggagagggggtggggagcttctgttctggtgaagggacccgggcaggcccccagcaccccatgctgacttggagaaccccagatctctggggcccagccaggcagggtgtgggggcagctgtgccaatctacctcacaggcccaccccctgccgggcatgccgtgggatcatgggcagggaaggctctgggggtcggagacaccgctgcttagcacccccagccagaacaccctgagggtctcggggctctggagagagtggggcgggaggaagaattggcaccttcctagggaaggagacgagcgcttcgccttgattctccgagaagcctccgagaagtgctttaagtgtgtttgcatgcgccaggcggtgggcagcgggggcctgtccagccctctcccgccatccttccccaagtgacgtccactgccttgtcaccagcgacctgcctgtcatgcccaccccctgaggaagcatggggaccctaacaccctggtgccctgcaccagacaggccgtggtcaggcccaggccaccggccgggttctgccacagcttcccacgtgcttgctgacatgcgtgtgcctgtgtgtggtgtctgttgctgtgtcgtgaaactgtgaccatcactcagtccaaacaagtgagtggccctcgaggccacagttatgcaactttcagtgtgtgtcataacgacgtcactgctttttaaactcgataactctttattttagtaaaatgcccaggagtcctggaagctacgcggacttgcagaggttttattttttggccttagaatctgcagaaattaggaggcaccgagcccagcgcagcagcctcggacccggattgcgtttgccttagcggatatgtttatacagatgaatataaaatgtttttttctttgggctttttgcttcttttttcccccccttctcaccttcccttctccccgaccccaccccccaaaaaagctacttcttcattccgtggtacgattattttttttaactaaaggaagataaaattctatattcttaaaaaaaaaaaaaaaaaaaaaaa

SEQ ID NO: 408 - DNA, 4135 bp, Human
ccgcggccctgggagctggaggaaccgcgactcagcaggcatgactggagagggaagtcccaatggtgctagaatggtgctgcagtggcagaagacggctcacaagtgaggtctggaagaacaacagggaagacatccatcatttgctccaaagtgtgcaagtcaaatcctggggagaatcatgataaccctgatcactgagcagctacagaagcagactctggatgagctgaaatgcacacgcttcagcatcagtctgcctttgcctgatcatgcagacatctccaactgtgggaactctttccagcttgtgtctgaaggtgcttcctggaggggcctgccccactgttcctgtgctgagttccaggacagcctcaacttcagctaccatccctcaggcctgagcctgcacctcagaccacccagtcggggaaactcccccaaggagcagcccttctcccaagtcctaagacctgagcccccagatccagagaagcttcctgtgccccctgcccctccatccaagaggcactgccgctcactctcagtgcccgtggacctgtctcgctggcagccggtgtggcggcccgccccctccaagctgtggactcccataaagcaccggggcagtggtggagggggtgggccgcaggtgcctcaccagagccccccaaagcgggtctccagcctcaggttcctccaagctcccagtgcctcttctcaatgtgccccagctcacagaccctacagccctcctttcttcagcctggccctggcccaagattcctctcgaccctgcgccgcctcccctcaaagtggctcctgggagagtgatgctgagtccttgtcaccttgcccacctcagcgccgcttctccctgtcacccagtctgggcccgcaggcaagccgcttcttgccctctgcccggagctctcccgcatcctccccagagctgccctggcgacctcgaggtctccgcaaccttccccgaagccgctcacagccttgtgatctggatgcccgcaaaactggggtcaagcggcgccacgaggaagacccccggcgtctgcggccttcgttggactttgacaagatgaatcagaaaccatactcaggaggtctttgtctccaagaaacagcccgggaaggcagcagcatctctccaccatggttcatggcctgtagccccccacccctctctgcttcctgcagccccactgggggttcctcccaggtgctgagtgaaagcgaagaggaggaggagggggctgtgcggtggggtcggcaggcgctgagcaagcggacactgtgccagcgggactttggggacctggacttgaatttgattgaggaaaactaaaactgagaggctacttcctggggccacacagactgactctctcatggctactaacaagtgtcgagtccccaaggctgggggccgagcctgggaatgggggtgagtggagggctccgactcagggcagctggaaatcttctcgctccagcaagctcgaccatgccaagagactggccgggacaagataaacggagctggtggcgggagggacagccccagagcagacccttcctatggcggccctgagtgtgagtatccctgccaccaagagagcaatgggcagggaaggaaggggtctgccgaccccagctcggggaatttcactagcccctttgcttcaaagggcacttgtgtcttagaatttggccagggtggggggttgagtcagcctcctcagagaaactgcgtgagagtgtgtgcgtgcatgggagtgtacttgtggaaaggtgtgtttgcgtagccttagggaaggaaggcaattgctccttaacagcagagtatcatgatacccccaggatcttgagttttttacaggatgttgggtttgctcaaggagtcaagaggagggcaccaagttttccttttttctaaatagctctggaaccaggcttgtaatccatagcatcaccgactctgcaaaggatttcattttggggtacagcagggtgttttaagtgctgtgacttcagctaatgatcttttcttcagccccaccccctccccactagctcgatctagtatattggggaatgcaggtggggggtgtcaccatattttttctgagctggcctttttttctcatcagattgtccaggctatattccacctgcctcttttgccctcttgagtagagttgcacacagcacatgggcaactgaagcagggttgaggggctctatctctctctctcctctgctgatgggacccttttcccctcaccctctgcccttctaagtcatagactaggtaggaaggccctatattggtccccagcatctactgaggcagacctgcaacagaagtggcattcagtccccagcagacatgggtgagctcaccccagcactgctgttgggaaggtgactgcaggaaaccaattcttacaagatccaggcccagcctttttgacctgcttgagagggaagaaggggtgtttagcatttaatagtttgcttgtcttccactcctgccaggaagtgtttatttgcctctaattgggcctgagagaccatagggaggttggggctcactgagggattggctgaggatgtataaagcaaaggctgtgagaagcagttgggagtttggttgtcattggattgaatttacttttttgtttctcacccgcaacttgagccaggacagctggtccaagtggccacagtgatgggtttaagtaccttggtagggctggcaccagtggaaacacatactgaagctgccaccacaatagcttgtgaggttttatccagctttggttagaccctgcatgaccaaatttgacctgcccttgtttatggcaagaagggcatttttctcttcaatttccagggtttcctaggacccagttcctcatgtaagggaggaagaccaaggtctttgtgttttcttcctcatggaattgaacctgacattttctggatctcctgcatgtcaggagcatcagtgaggcttcagcctccttgtctccactccagagaggaggtggctatgtcttcttaagcctctggccctcagaggctcctccctatctcctggctagttaccactaggctaccaggtctctaggggcctgagagaggccctctagagaatccagggaaactgtgagcccaggagttgcccatctatggtttcattcctcccctggctcttctccctcttcaggccataatttccctggtgccaatttcttttcctcctggggcatcctcatcccagggctctctgctgtagattggctgtgccagcttccaacaggttactggcaatgccagtgagtttctgtaggccctaagctgaagaagtgaggcagtgattctgcctccatcctggtttccccaaagccccagggcaccatccttaagggagaaggtctacagttatcattattttaattccattactttcagtctggaaaactaagctagtcagaactgtcatcttgcttcccaatctaagaacctgtggccctggaacacttttcaagaattggttcattttgctttacacagtagatctgttccaacagttctgtgtaaaccaaatgctatttttcaatgcatttggactgctgaccatttaaaagcagcctatgattgcttctttttgtaaagcaagcaacctccctccactttagctgttttgactatttgaattttcacatattgggcttacccagagtggagcacacctccagggcatgtggctgacactgggtcaatgtctgcatctgtgctgtgtgtgtagtgtggttggccagtaggtgagtatccctgtgtgtgtgagtgaagccactccccaggctggtgctctcctcctgtgcccagtgactgcccagtggcagctcagctgcccttcactcccacctgctgccaaagtccctgtgctaatgggattacaaatacaaaaagtggaaaaaaattttcgtaaactttgttttatattaaaagaaaaatccataagtctgtgtgtgttaaacatgaggttctgcctctgtggctgtgtttgaaaaaataaagttttattagaataatccattttcccaagcaaaaa

SEQ ID NO: 409 - protein, 392 aa, Human
MITLITEQLQKQTLDELKCTRFSISLPLPDHADISNCGNSFQLVSEGASWRGLPHCSCAEFQDSLNFSYHPSGLSLHLRPPSRGNSPKEQPFSQVLRPEPPDPEKLPVPPAPPSKRHCRSLSVPVDLSRWQPVWRPAPSKLWTPIKHRGSGGGGGPQVPHQSPPKRVSSLRFLQAPSASSQCAPAHRPYSPPFFSLALAQDSSRPCAASPQSGSWESDAESLSPCPPQRRFSLSPSLGPQASRFLPSARSSPASSPELPWRPRGLRNLPRSRSQPCDLDARKTGVKRRHEEDPRRLRPSLDFDKMNQKPYSGGLCLQETAREGSSISPPWFMACSPPPLSASCSPTGGSSQVLSESEEEEEGAVRWGRQALSKRTLCQRDFGDLDLNLIEEN

SEQ ID NO: 410 - DNA, 2161 bp, Human
actttcccctctccgtctcctgcgggcgcaatggaggaggaggatgaggaagcgcgggcgctcctggcaggcggccctgacgaggccgacagaggtgccccggccgcccctggagccctgccggccctctgcgaccccagtcgcctggcgcaccggcttttggtgctgttactgatgtgcttccttggctttggcagctatttttgctatgataatcctgctgcccttcagactcaagttaaacgagatatgcaagtgaataccacgaaattcatgctgctgtatgcctggtattcttggcccaatgtagttttgtgtttctttggtggctttttgatagaccgagtatttggaatacgatggggcacaatcatttttagctgctttgtttgcattggacaggttgtttttgccctgggtggaatatttaatgctttttggctgatggaatttggaagatttgtatttgggattggtggcgagtccttagcagttgcccagaatacatatgctgtgagctggtttaaaggcaaagaattaaacctggtgtttggacttcaacttagcatggctagaattggaagtacagtaaacatgaacctcatgggatggctgtattctaagattgaagctttgttaggttctgctggtcacacaaccctcgggatcacacttatgattgggggtgtaacgtgtattctttcactaatctgtgccttggctcttgcctacttggatcagagagcagagagaatccttcataaagaacaaggaaaaacaggtgaagttattaaattaactgatgtaaaggacttctccttacccctgtggcttatatttatcatctgtgtctgctattatgttgctgtgttcccttttattggacttgggaaagttttctttacagagaaatttggattttcttcccaggcagcaagtgcaattaacagtgttgtatatgtcatatcagctcccatgtccccggtgtttgggctcctggtggataaaacagggaagaacatcatctgggttctttgcgcagtagcagccactcttgtgtcccacatgatgctggcctttacgatgtggaacccttggattgctatgtgtcttctgggactctcctactcattgcttgcctgtgcattgtggccaatggtggcatttgtagttcctgaacatcagctgggaactgcatatggcttcatgcagtccattcagaatcttgggttggccatcatttccatcattgctggtatgatactggattctcgggggtatttgtttttggaagtgttcttcattgcctgtgtttctttgtcacttttatctgtggtcttactctatttggtgaatcgtgcccagggtgggaacctaaattattctgcaagacaaagggaagaaataaaattttcccatactgaatgagaagttaaaatgaatgtgtcatgagaatgggcttaacacatcgttggtttgaaaacttccatttttaaaaatttagagtttagtcattagaaaaaataatggactggaaagttatatttatatccaaatatacctatttcaaagtgtatttgtgaggcctgttttagcctgtgtcttttgtattgtgtgttgctaaagaattctacttttagtaggctaatcaacaatgaaagggttagaaaattgctgtggaacatccaggtgaacttcaggaaagacagtgaaaaatggaaaacgttggagcttctgttgagataatcttcattaggtatatatcttagggatacagccttttctttatcttatagcaggaaaaaaaaacttttgagggaaatagaagggctgcgttacacaaaataaacaatggcattgtcataggccttccttttactagtagggcataatgctagggaatatgtgaagatgtttttatgaagtctctttctgatcacgaacaatagcttgcgctctactctgtagttatgtggattgccgagcaatgacccttttcaatttcttatttctgtgttactgaggaccctaatcacttagggatgtaattttatagtataaactttctgtacagtttttcttatagtctaataagtaaaaagtgtccttcaaattatgataattgcctatgtacatggataaattaaaacactgcacacgg

SEQ ID NO: 411 - protein, 465 aa, Human
MEEEDEEARALLAGGPDEADRGAPAAPGALPALCDPSRLAHRLLVLLLMCFLGFGSYFCYDNPAALQTQVKRDMQVNTTKFMLLYAWYSWPNVVLCFFGGFLIDRVFGIRWGTIIFSCFVCIGQVVFALGGIFNAFWLMEFGRFVFGIGGESLAVAQNTYAVSWFKGKELNLVFGLQLSMARIGSTVNMNLMGWLYSKIEALLGSAGHTTLGITLMIGGVTCILSLICALALAYLDQRAERILHKEQGKTGEVIKLTDVKDFSLPLWLIFIICVCYYVAVFPFIGLGKVFFTEKFGFSSQAASAINSVVYVISAPMSPVFGLLVDKTGKNIIWVLCAVAATLVSHMMLAFTMWNPWIAMCLLGLSYSLLACALWPMVAFVVPEHQLGTAYGFMQSIQNLGLAIISIIAGMILDSRGYLFLEVFFIACVSLSLLSVVLLYLVNRAQGGNLNYSARQREEIKFSHTE

SEQ ID NO: 412 - DNA, 1364 bp, Human
cacctcgactgcgaattactgtttatgaggtgactcgctggttctatcggtggacagtgggacattctgaagggaggcaaggaggcggactgagcgctcccaattggggaggatgctggtggtggaggtggcgaacggccgctccctggtgtggggagccgaggcggtgcaggccctccgggagcgcctgggtgtggggggccgcacggtaggcgccctgccccgcgggccccgccagaactcgcgcctgggcctcccgctgctgctgatgcccgaagaggcgcggctcttggccgagatcggcgccgtgactctggtcagcgccccgcgtccagactctcggcaccacagcctggccctgacatccttcaagcgccagcaagaggagagcttccaggagcagagcgccttggcagctgaggcccgggagacccgtcgtcaggaggtcctggagaagattacggagggccaggctgctaagaagcagaaactagaacaggcttcaggggccagctcaagccaggaggccggctcgagccaggctgccaaagaggatgagaccagtgatggccaggcttcgggagagcaggaggaagctggcccctcgtcttcccaagcaggaccctcaaatggggtagcccccttgcccagatctgctctccttgtccagctggccactgccaggcctcgaccggtcaaggccaggcccctggactggcgtgtccagtctaaagactggccccacgccggccgccctgcccacgagctgcgctacagtatctacagagacctgtgggagcgaggcttcttcctcagtgcggctggcaagttcggaggtgacttcctggtctatcctggtgaccccctccgcttccacgcccattatatcgctcagtgctgggcccctgaggacacctcccactccaagacctggttgctgctgggcgccttggaaccagcgtcagaaagaccctgctcctctgttctccgcagcctgatggtaaggtggtctacacctccctgcaatgggccagcctgcagtgaactccagagacctaggggatgtggctgtgtcggcagcaagagcctttctggatgttccccagctcttctctgggagtctagaacatcctcctacctttctccgcggttagtttttgattccaggttttcgaacactacatcttttttatgttcttccttgtttcaaagcacttattggctgtgtttttgtagttacctattttcacactgtgagcttcccgagaatggggcctgggtttgattcatctgttttctacagggtttaagtctcaggaggtctcaataaacttggtatataaatgttaaaaaaaaaaaaaaaa

SEQ ID NO: 413 - protein, 390 aa, Human
MLVVEVANGRSLVWGAEAVQALRERLGVGGRTVGALPRGPRQNSRLGLPLLLMPEEARLLAEIGAVTLVSAPRPDSRHHSLALTSFKRQQEESFQEQSALAAEARETRRQEVLEKITEGQAAKKQKLEQASGASSSQEAGSSQAAKEDETSDGQASGEQEEAGPSSSQAGPSNGVAPLPRSALLVQLATARPRPVKARPLDWRVQSKDWPHAGRPAHELRYSIYRDLWERGFFLSAAGKFGGDFLVYPGDPLRFHAHYIAQCWAPEDTSHSKTWLLLGALEPASERPCSSVLRSLMVRWSTPPCNGPACSELQRPRGCGCVGSKSLSGCSPALLWESRTSSYLSPRLVFDSRFSNTTSFLCSSLFQSTYWLCFCSYLFSHCELPENGAWV

SEQ ID NO: 414 - DNA, 1535 bp, Human
gggcgtttacaggcaggcaggtcagtgatgtgtcctaagggtccgaccgacctagatacccctctttgattcctcctcttgggattagtgtccatctctggaagcaggatccaggaggacgggaggggccgctgcggaccgcagtcgctccacctggaggagacaccagaaggaagacagcctgagggacgcagccatccccggctcctaccggcgccccgccccgcgcatgcgcacgcgcacagggagtcagctggctgcgcgggaggtcacgggaagtggggcggtgcccagacagctggagggaaggaggtgtcaggcggggagagacgcaaacggcgggaccagcagcgacggtagcagcagcatggccgcgatctatgggggtgtagaggggggaggcacacgatccgaggtccttttagtctcagaggatgggaagatcctggcagaagcagatggactgagcacaaaccactggctgatcgggacagacaagtgtgtggagaggatcaatgagatggtgaacagggccaaacggaaagcaggggtggatcctctggtaccgctgcgaagcttgggcctatctctgagcggtggggaccaggaggacgcggggaggatcctgatcgaggagctgagggaccgatttccctacctgagtgaaagctacttaatcaccaccgatgccgccggctccatcgccacagctacaccggatggtggagttgtgctcatatctggaacaggctccaactgcaggctcatcaaccctgatggctccgagagtggctgcggcggctggggccatatgatgggtgatgagggttcagcctactggatcgcacaccaagcagtgaaaatagtgtttgactccattgacaacctagaggcggctcctcatgatatcggctacgtcaaacaggccatgttccactatttccaggtgccagatcggctagggatactcactcacctgtatagggactttgataaatgcaggtttgctgggttttgccggaaaattgcagaaggtgctcagcagggagaccccctttcccgctatatcttcaggaaggctggggagatgctgggcagacacatcgtagcagtgttgcccgagattgacccggtcttgttccagggcaagattggactccccatcctgtgcgtgggctctgtgtggaagagctgggagctgctgaaggaaggttttcttctggcgctgacccagggcagagagatccaggctcagaacttcttctccagcttcaccctgatgaagctgaggcactcctccgctctgggtggggccagcctaggggccaggcacatcgggcacctcctccccatggactatagcgccaatgccattgccttctattcctacaccttttcctagggggctggtcccggctccaccccctccaagctcagtggacactgggtctgaaaggaaggagtcttttgcttcctttctcctttttacaaaaacaaacatagaagaaaataaatgcactttatccactccccaa

SEQ ID NO: 415 - DNA, 5634 bp, Human
gccttttccctccggctcgggagcgtctcgcttgcgccccgggcccgcggcgcccgcgcggctgcgagcctcgggtggccgcgtgccggctccaggaagccggagagggcgcggcggccaggatggcgcggcacgggccgtgcggctagacgggagccgagggaaccgccggctcgcgccctccgttctttcccggagccggcttcacgcagggccgggaacggccgtgcctctgggatccgccttcgctgacgccgggcacctacctggacgcgagcgagcgagatgcccaaccccaaaaacagcaaaggcggccgcaaaaacaagcgcgccaacagcagcggcgacgagcaggaaaatggagccggggccctggcagcggcgggcgcggcgggagcggcggccgggggggccctggcggcggcggccggttgcggggcggcggcggcgggcgcgccgggcgccggaggcgcggcgggcgccggaggcgcggggactggcgccgcgaacgctgcggccgccgcgggggctgcggccgcgggcgatgccaaaaacgaagccccatgtgccactcccctgatctgcagcttcggtaggccggtggacctggagaaggacgactaccagaaggtggtgtgcaacaacgagcactgcccctgcagcacctggatgcacctgcagtgcttctacgagtgggagagcagcatcctcgtccagttcaactgcatcggccgcgcgcgcagctggaacgagaagcaatgccgccagaacatgtggacaaagaagggctacgacctggccttccgcttctgctcttgccgctgtggccagggccacttgaagaaggacacagactggtatcaggtgaagcggatgcaggacgagaaaaagaagaagtctggctccgagaagaacacagggaggcctcctggtgaggcggcggaggaggcaaaaaagtgcaggcccccaaataagccccagaaaggcccaagccacgacctcccccgccggcattccatggaccggcagaactcccaggagaaggcagtgggtgccgcagcctacggtgcccgttcccccggtggctccccgggccagtccccacccacgggctactccatcctctctcctgcccacttcagcggcccccgctcctccagatacctcggggagttcttaaagaacgccatccatctggagcctcacaagaaggccatggctgggggccatgtgttcagaaatgcccactttgattacagccctgcggggttggcagttcacagggggggacacttcgacacccccgtgcagttccttcggcggctggacctctccgaactcctcactcacatccccaggcataagctgaacactttccacgtgcgcatggaagacgatgcccaagtgggccagggggaagacttgcggaagttcattctggccgcgctcagtgccagccacagaaacgtggtaaactgtgccctgtgccaccgggcgctcccggtgttcgaacagttcccactggtggatggaactttgttcctaagcccgtcgagacatgatgagatcgaatatgatgttccttgtcaccttcaagggagactcatgcatctgtatgccgtgtgcgtggactgcctggaaggggttcacaagatcatctgcatcaagtgtaagtcacggtgggatggcagctggcaccagctgggcactatgtacacctacgacatcctggctgcctctccatgttgtcaggcccgcctgaactgtaagcactgtgggaagccggtgatcgacgtgaggatcgggatgcagtacttctccgaatatagcaacgtccagcagtgtccacactgtgggaacctggactaccacttcgtgaagccattttcctccttcaaagttctcgaagcttattgatgaaagctttgctttagtaatagctattttattgatattattactttattacatatcttttatagggaaacattctgtgacattaatttcctttctaatttaaaggagagttactttgttgtatgtgtgccactaaaataggggctgcccttgccctgtcttgattcccgagtgttaatctgtggttttgaccagagcccagatgggtaatcctgtgcatttgggttggggttcactcttaccaagaatctttgatgcagctttaagatggtggggaggatggggtgaatttaggaaaggaatttgtggttataaactaagagcttgataggagttggaaggaaactcttactaaaatgttaactttctaaaaaccttcttttagatcttccttgggcctttggaaaaatatgtgacaagtgaatgtaagtctgtgcctggagagctaatagtgcattagtctatctcagcctagtgttctgcagcacacatgggcaggcagtttactcacactgacaggtgacctgaaagtggcacaagtgctgtttctatcactattgtaatttgccagttcatttttcatgctgaaagtaatatccaaattgtaagacatatgaaagatattagtgttgcaaatatgtttaggtaaactgacctataacagaatatgtgaaatgaatttggaaataatgcaagaaggcagaactcaatcatttaaattgtgtctttgaagttggtaatatagcttttaaggagaacccatgaataacctgatttgggcagtgatgatttattacaggttgcactgttgaagtgtcatttggtgtcaggttcttctcacaggtaaatctttcagccacagaatctaactggtgagcttcagaaccaataattgccacatttattgtcctcaaaattgcttatggccatgtttaaccaattaattctgagtttccaaaatcaaagatttgaccttaagagggaagggaaaaaagtgtgaaaggatgatgaagaaaataattttactatttcttttaaaagtatgttttggaaaatcaatgattttaatgcatagcagtatgtttgaaaaatagaccattctaaaaagcccatgataccttactgttgatgaaaaaggatgatcatatatatagaacttgattagtcagagcattgggcattccaaaatacagcctttggttcagtagattttaatgctttaaatagactgacgtcgcatacccttatagaattggaatatgatttctcaaaaattaatttgataatttcatgtatgatgtgcatatatgctaaaagaatgcagaaaatcattttatgaatagccaaatttggggttgatgtgaacattttatgttactcatttggtttatacttttttttttttttttttaactgtgtggtttttcttttcagaagtatttaggcaatattgcacgtgagtttcagttctttttttcttttttttgagatggagtctcactcttgtcacccaggctggagtgcagtagtgcgatctcagctcactgcaacctctgcctcctggattcaagcgattctcctgtcccagcctcccaggtagctgggactataggcacgtgccaccacacccggctaattttttgtatttttagtagagacagcgtttcaccatgttagctaggatggtctagatctcctgaccttgtgatctgcctgcctcggcctcccaaagtgctgggattacaggcgtgagtcactgcgcctggccaagtttcagttctatatgaagtatttgatgttttgtttgaaacaatacagcattaaagaaccaatgttattcactaatatcattcatctttcagtttggatgatttggtttgctgcatctaggtcggtgtttgatcatctgaaaaaacatttcagtgggaagaaatgcataaaatgcctataagaagtagaaagtcattgaactgacagtgtttgatgcaactaaaagaggattgtaagcatagctttctgcaaacttgtctttaatgcacaaagctgtagtggtgaattaactatctccttattgattctctcctgtacccagatgcaaaaagtgctaagtttctcttgtcctcgtaataccatttggattttatttctgaatttaaatagtaaaatatttatgatgctgatctttaacccacctaaaattttatagtgaaacctgctttatattgttgttctgaagcttacaattgacctatacattgcattcagcaagctcctgaatttagaactgccgtcagtgtagtgtatgctgtgttccatgttgcctttttagatggctttctaccccctgaacaataaataggatgaggttttactgtaattgggtaaagtttactcttggacattatttcgatgctaaagtaaggattctgtggatgttacttaaagagaaaagcataagagcatgaagcatatctgggaatatcttttgcctttaagacgattcattcttgtctagagggaaaatctggctgatttgggaataaaatataatcgaatattcaacaccatgaagataaatcttattttggaaatctactgaccttaataccccaagcttgccctgaatactttgattggaattggaatatatcaaaaaaggttagtatttttgttgtagttaggatactaaaaggatattagttacccaagagatccaatttgtttttctgatgaatagtgttcagtaaaatgaagcagtcttaagagtgactaataatttcaaagtgatttttcgtctattcttaatattttttaattatttatttttaagagttttataccttgagcagatacaatgatctgctttagtgagaggacaatttctgattgattgttttctcttcaggccatctcacctcttcattctcttgttacatttgaagcagttgatataatgggtttatactttaaaagatagacatggtgccatgaagttggggagttgggtgaattatcccattctagttacagaggagctttccttaaatgccctttaacttctaggttttgttcaagaagttcattttctgagtaaaagttattttcatatatgttgggggaaaattaactcatctaaaaagaatcttattaggtatttgaactctaaaactaacagataagacagatatgtaccttattagagcaccagaactaatttgctaagtcttttgtttagtcctgcaagactgatgcttaatacacagtctgttctcctgtgtctaggtcaggaactccagtttgcttttctgttttgtgtcctggtagcagctgttgagtaactttcattggaggttgggaaggaagtgaggagaaagtgttcttgtttagtgttttatttcctataataggatgctgcctaacccagttcatctctatgtcctgttcactgaatattccgggtaattgaaagaaaatataatggatgggctccattaaaaccagctcaaaaataaattcttgtcagtaaagatttcttgtcaagatgtcttggattgcacttttgttgaggaaagacagtgtaaatagttaaagaatgttgataaaattgaaacatttggttgtggaattgtgtgtggttttagagggtttctgtttgtgaaatgtatgtattaaaaataataaaattccagaaactaaaaaaaaaaaaaaaaaaaaaaa

SEQ ID NO: 416 - protein, 543 aa, Human
MPNPKNSKGGRKNKRANSSGDEQENGAGALAAAGAAGAAAGGALAAAAGCGAAAAGAPGAGGAAGAGGAGTGAANAAAAAGAAAAGDAKNEAPCATPLICSFGRPVDLEKDDYQKVVCNNEHCPCSTWMHLQCFYEWESSILVQFNCIGRARSWNEKQCRQNMWTKKGYDLAFRFCSCRCGQGHLKKDTDWYQVKRMQDEKKKKSGSEKNTGRPPGEAAEEAKKCRPPNKPQKGPSHDLPRRHSMDRQNSQEKAVGAAAYGARSPGGSPGQSPPTGYSILSPAHFSGPRSSRYLGEFLKNAIHLEPHKKAMAGGHVFRNAHFDYSPAGLAVHRGGHFDTPVQFLRRLDLSELLTHIPRHKLNTFHVRMEDDAQVGQGEDLRKFILAALSASHRNVVNCALCHRALPVFEQFPLVDGTLFLSPSRHDEIEYDVPCHLQGRLMHLYAVCVDCLEGVHKIICIKCKSRWDGSWHQLGTMYTYDILAASPCCQARLNCKHCGKPVIDVRIGMQYFSEYSNVQQCPHCGNLDYHFVKPFSSFKVLEAY

SEQ ID NO: 417 - DNA, 3933 bp, Human
gggaaacccttccgggtgtgtgcttggtgggggtgggggtgggggtgggggtgggggtggggggtgggtgagaaaaaaaagaggtgggttcgcctggagtccctgcggccgccgcggaaggcccccgcttctttccccgcggcgagcagcagcgctggggcagcggagagacagaggagccagcgggtggccatggccttggcgtgacagagcctccccggcggccgggcgggtgcggacggcggggccggacgacccccgcgggagccggggcccagaaacccgcccgggcagcggtaactggaacggagccctcaggcctgagccggctgggctgcgcgagcaggaagcggggtccctgggcccctttgtgtgaagggcgggggaggagtgccgggcagccccgggctgcgggctcctccgacgtccgcctcgccgcagggtcccctcgccgcagcccccaccctttccctcccgggggcacgcgcctcctcgccaccctcgccgggcttttcccaggctcgccctcctccccacgccccctgctcgggctgcagttcctataggaagggcattaccatcccttccccaccctccccgactctacgctctttcccctccccctcctgtaacttcctcttcttccccggttgggccctctgctcctctgcactctcctccccagttcgcagatttccgcccaccttccgcctcgtctagccgcgccacagctagcggggtgatctttccccccctctggtaggagttggtgaaggtgagactcatgagggaatacaaggtagtggtgttagggagtggaggggttggcaaatctgcccttactgtgcagtttgtcactgggactttcattgagaaatatgaccccaccattgaagatttctaccgcaaagagatcgaagtggactcttccccctccgtgctggaaattctggacaccgcaggaactgagcagtttgcctccatgagagatctctacatcaaaaacggccaaggtttcatcctggtttatagcctggttaatcaacagtcttttcaggatatcaagccaatgagagatcaaattgtcagagtgaagagatatgaaaaagtcccactaatcctagtaggaaataaagtggatctggaaccagaaagagaggttatgtcttcagaaggcagagctctggctcaagaatggggctgtcctttcatggagacatcggcaaaaagtaaatcaatggtggatgaactttttgctgagatcgtcaggcaaatgaactattcatccctgccggagaagcaagatcagtgttgtacaacttgtgtcgtccagtaaagaagataacctcaatcatggccataccgagcagataaaactcagaggaaatttgcacagatgctgctttggagaactttacaacctgggttgcagaactgagccttggtaaacctgtctctattacagcatgttgccatacatctatttaagtgcataaggtctttggccttcaagatccatcgaccttaaacaggaatgcttagcacgtttaccatacgtttaaaatccattctttatcaatcagtccttttatagctttctaagttcttattgatggctaatatacaagggttaatttttaatattttaattgatttctttaatcagtttctcgacttgtatttattaaatactcaaactcagtattacctactcaatgccttttaaaagaaagttataatggagaaaaaattgagccttaaacaaatggttacttctgtatattacctcgtaccagtgcttcatcctatttgtaaaatctttctcctttaaaattattggttaatactttgagactttgtttacgtgtggcagtgttgtaaaaagaaactaaagatcacattttacctgtatggatggaatatcccttttcttcaagtgcagtttgtgatgtgttttgtttttttttttttttttttgtaattaacatgttctgaaggttacaattgatatttgaaattgactgtagagcatttagttgaagagttaagcattcagttccattaggttttcacatgtgttaatctcatttacagcattgaattgcggcagtaacattttcctttctgtgaagttctaaatttagttatgacctatttagcaatgcctttgaaaagggatattgtatccatggtaaattaattgtatacctaaacagagatagctcatctttgcctatcaggcttgtaattgacatctagtagacttctgcacatgtaaaattgaattcaaataaaatcatacacactttctagttcttaatatttgtctttctgaataatagtttaaagcaatatttgttaaagttttcttgcactatcacaattgctttttagttatttctcaagaagcatgttcgtattagagacaaaatctgtgtaacaggagggagaatagcgccaagtctctgggctattttttatttttgcaaatgtgctttctaatagccattgccttccatgttgtttacctaatcagcatatttttgtctgaatacttgaacattttaacagtaacgcaggtgtagaatcagaaaggaaacttatgcagagtaatattttggttcagttttaacatcgtgacaatgagggctttttctagcaatgatttttaaattgtgtaagtttgacagtattttattgttgggtttttatttgattttagttgtgtgcttttcatttgcagaagttagtaactgcagctcacctactgcaccaaagttctcgattttaggagcccagctttagtcatttgaacatgcttctaaataaaataaaacaaaaccaaaactatacttttgatctataataagagctcaataactttgtcaaggaaagctctaatatatgcagtgatggtttatgaaagggtgtggcaattttaaatttatattgtgtgtgatgttcaaataaagtggtatctacattcatgtgatttatgggtcagcatgaccattaattactgagtagaaattgactaaactttgatttcctttttttaaatcgtgttgcatttgattcctgagcaaattccctcaaagtgaactcttgttcttaaattttgaattttatggtgagattgtaaagatagaggcaattgaaacattgttccttatttatgaactgcttgaagtgaatacttaatttaagtttgcactttaataccaaacttaaaaccaaacactcatttaaaagtaggttaagtgatcatggatcattgttattagctttgtggctttgtgaaattctaaaggaatcaaataattcatcatgatttaaattttctagagattttgatttttttataatgtttctttcctgtagattgtgttcttgtttctctctctctctctctctctctctctctctctctctctctctctctctctctctcaaaattacagtgttcattgtcattgacctcagcagcaaatttgacttgaattcacttaggatcgcaggaatcaggggaaagtgattttaaaggtggtttctccagcacattttaagaaaagggaccaaaagttattttagcttcctcaatagattgcatgttgcttattaggataataaattaatattaaatgcaatatatgtcttgtctttattatggcatctatttaggagttgttcaaatcactgcagtagggctctgcaaataaaataatgtaacctattatcatggatctaatgtactgtaactttatcagtgaaaggtaaaatctcaaataacaagtacaaacattgaacaattacctataaagatttgtaaaagtaaaatttttccaatagatttcattcttgtcattttgtaagacgaccctgcagtccacctgtttgtaacttttttaataaaatagacatctgtattactga

SEQ ID NO: 418 - protein, 183 aa, Human
MREYKVVVLGSGGVGKSALTVQFVTGTFIEKYDPTIEDFYRKEIEVDSSPSVLEILDTAGTEQFASMRDLYIKNGQGFILVYSLVNQQSFQDIKPMRDQIVRVKRYEKVPLILVGNKVDLEPEREVMSSEGRALAQEWGCPFMETSAKSKSMVDELFAEIVRQMNYSSLPEKQDQCCTTCVVQ

SEQ ID NO: 419 - DNA, 4662 bp, Human
ggaaagtccaccttccccatcaaggccagcctgggaacatggagtggcagcggccgcagcaaatgagagagccaacgcgcggaaagtttgctcaatgggcgatgtccgagataggctgtcactcaggtggcagcggcagaggccgggctgagacgtggccaggggaacacggctggctgtccaggccgtcggggcggcagtagggtccctagcacgtccttgccttcttgggagctccaagcggcgggagaggcaggcgtcagtggctgcgcctccatgcctgcgcgcggggcgggacgctgatggagcgcgccatcagcccggggctgctggtacgggcgctgctgctgctgctgctgctggggctcgcggcaaggacggtggccgcggggcgcgcccgtggcctcccagcgccgacggcggaggcggcgttcggcctcggggcggccgctgctcccacctcagcgacgcgagtaccggcggcgggcgccgtggctgcggccgaggtgactgtggaggacgctgaggcgctgccggcagccgcgggagagcaggagcctcggggtccggaaccagacgatgagacagagttgcgaccgcgcggcaggtcattagtaattatcagcactttagatgggagaattgctgccttggatcctgaaaatcatggtaaaaagcagtgggatttggatgtgggatccggttccttggtgtcatccagccttagcaaaccagaggtatttgggaataagatgatcattccttccctggatggagccctcttccagtgggaccgagaccgtgaaagcatggaaacagttcctttcacagttgaatcacttcttgaatcttcttataaatttggagatgatgttgttttggttggaggaaaatctctgactacatatggactcagtgcatatagtggaaaggtgaggtatatctgttcagctctgggttgtcgccaatgggatagtgacgaaatggaacaagaggaagacatcctgcttctacagcgtacccaaaaaactgttagagctgtcggacctcgcagtggcaatgagaagtggaatttcagtgttggccactttgaacttcggtatattccagacatggaaacgagagccggatttattgaaagcacctttaagcccaatgagaacacagaagagtctaaaattatttcagatgtggaagaacaggaagctgccataatggacatagtgataaaggtttcggttgctgactggaaagttatggcattcagtaagaagggaggacatctggaatgggagtaccagttttgtactccaattgcatctgcctggttacttaaggatgggaaagtcattcccatcagtctttttgatgatacaagttatacatctaatgatgatgttttagaagatgaagaagacattgtagaagctgccagaggagccacagaaaacagtgtttacttgggaatgtatagaggccagctgtatctgcagtcatcagtcagaatttcagaaaagtttccttcaagtcccaaggctttggaatctgtcactaatgaaaacgcaattattcctttaccaacaatcaaatggaaacccttaattcattctccttccagaactcctgtcttggtaggatctgatgaatttgacaaatgtctcagtaatgataagttttctcatgaagaatatagtaatggtgcactttcaatcttgcagtatccatatgataatggttattatctaccatactacaagagggagaggcacaaacgaagcacacagattacagtcagattcctcgacaacccacattacaacaagaatatccgcaaaaaggatcctgttcttcttttacactggtggaaagaaatagttgcaacgattttgttttgtatcatagcaacaacgtttattgtgcgcaggcttttccatcctcatcctcacaggcaaaggaaggagtctgaaactcagtgtcaaactgaaaataaatatgattctgtaagtggtgaagccaatgacagtagctggaatgacataaaaaactctggatatatatcacgatatctaactgattttgagccaattcaatgcctgggacgtggtggctttggagttgtttttgaagctaaaaacaaagtagatgactgcaattatgctatcaagaggatccgtctccccaatagggaattggctcgggaaaaggtaatgcgagaagttaaagccttagccaagcttgaacacccgggcattgttagatatttcaatgcctggctcgaagcaccaccagagaagtggcaagaaaagatggatgaaatttggctgaaagatgaaagcacagactggccactcagctctcctagcccaatggatgcaccatcagttaaaatacgcagaatggatcctttctctacaaaagaacatattgaaatcatagctccttcaccacaaagaagcaggtctttttcagtagggatttcctgtgaccagacaagttcatctgagagccagttctcaccactggaattctcaggaatggaccatgaggacatcagtgagtcagtggatgcagcatacaacctccaggacagttgccttacagactgtgatgtggaagatgggactatggatggcaatgatgaggggcactcctttgaactttgtccttctgaagcttctccttatgtaaggtcaagggagagaacctcctcttcaatagtatttgaagattctggctgtgataatgcttccagtaaagaagagccgaaaactaatcgattgcatattggcaaccattgtgctaataaactaactgctttcaagcccaccagtagcaaatcttcttctgaagctacattgtctatttctcctccaagaccaaccactttaagtttagatctcactaaaaacaccacagaaaaactccagcccagttcaccaaaggtgtatctttacattcaaatgcagctgtgcagaaaagaaaacctcaaagactggatgaatggacgatgtaccatagaggagagagagaggagcgtgtgtctgcacatcttcctgcagatcgcagaggcagtggagtttcttcacagtaaaggactgatgcacagggacctcaagccatccaacatattctttacaatggatgatgtggtcaaggttggagactttgggttagtgactgcaatggaccaggatgaggaagagcagacggttctgaccccaatgccagcttatgccagacacacaggacaagtagggaccaaactgtatatgagcccagagcagattcatggaaacagctattctcataaagtggacatcttttctttaggcctgattctatttgaattgctgtatccattcagcactcagatggagagagtcaggaccttaactgatgtaagaaatctcaaatttccaccattatttactcagaaatatccttgtgagtacgtgatggttcaagacatgctctctccatcccccatggaacgacctgaagctataaacatcattgaaaatgctgtatttgaggacttggactttccaggaaaaacagtgctcagacagaggtctcgctccttgagttcatcgggaacaaaacattcaagacagtccaacaactcccatagccctttgccaagcaattagccttaagttgtgctagcaaccctaataggtgatgcagataatagcctacttcttagaatatgcctgtccaaaattgcagacttgaaaagtttgttcttcgctcaatttttttgtggactactttttttatatcaaatttaagctggatttgggggcataacctaatttgagccaactcctgagttttgctatacttaaggaaagggctatctttgttctttgttagtctcttgaaactggctgctggccaagctttatagccctcaccatttgcctaaggaggtagcagcaatccctaatatatatatatagtgagaactaaaatggatatatttttataatgcagaagaaggaaagtccccctgtgtggtaactgtattgttctagaaatatgctttctagagatatgatgattttgaaactgatttctagaaaaagctgactccatttttgtccctggcgggtaaattaggaatctgcactattttggaggacaagtagcacaaactgtataacggtttatgtccgtagttttatagtcctatttgtagcattcaatagctttattccttagatggttctagggtgggtttacagctttttgtacttttacctccaataaagggaaaatgaagctttttatgtaaattggttgaaaggtctagttttgggaggaaaaaagccgtagtaagaaatggatcatatatattacaactaacttcttcaactatggactttttaagcctaatgaaatcttaagtgtcttatatgtaatcctgtaggttggtacttcccccaaactgattataggtaacagtttaatcatctcacttgctaacatgtttttatttttcactgtaaatatgtttatgttttatttataaaaattctgaaatcaatccatttgggttggtggtgtacagaacacacttaagtgtgttaacttgtgacttctttcaagtctaaatcatttaataaaactttttttaaattaaaaaaaaaaaaaaaaaaa

SEQ ID NO: 420 - protein, 1115 aa, Human
MERAISPGLLVRALLLLLLLGLAARTVAAGRARGLPAPTAEAAFGLGAAAAPTSATRVPAAGAVAAAEVTVEDAEALPAAAGEQEPRGPEPDDETELRPRGRSLVIISTLDGRIAALDPENHGKKQWDLDVGSGSLVSSSLSKPEVFGNKMIIPSLDGALFQWDRDRESMETVPFTVESLLESSYKFGDDVVLVGGKSLTTYGLSAYSGKVRYICSALGCRQWDSDEMEQEEDILLLQRTQKTVRAVGPRSGNEKWNFSVGHFELRYIPDMETRAGFIESTFKPNENTEESKIISDVEEQEAAIMDIVIKVSVADWKVMAFSKKGGHLEWEYQFCTPIASAWLLKDGKVIPISLFDDTSYTSNDDVLEDEEDIVEAARGATENSVYLGMYRGQLYLQSSVRISEKFPSSPKALESVTNENAIIPLPTIKWKPLIHSPSRTPVLVGSDEFDKCLSNDKFSHEEYSNGALSILQYPYDNGYYLPYYKRERHKRSTQITVRFLDNPHYNKNIRKKDPVLLLHWWKEIVATILFCIIATTFIVRRLFHPHPHRQRKESETQCQTENKYDSVSGEANDSSWNDIKNSGYISRYLTDFEPIQCLGRGGFGVVFEAKNKVDDCNYAIKRIRLPNRELAREKVMREVKALAKLEHPGIVRYFNAWLEAPPEKWQEKMDEIWLKDESTDWPLSSPSPMDAPSVKIRRMDPFSTKEHIEIIAPSPQRSRSFSVGISCDQTSSSESQFSPLEFSGMDHEDISESVDAAYNLQDSCLTDCDVEDGTMDGNDEGHSFELCPSEASPYVRSRERTSSSIVFEDSGCDNASSKEEPKTNRLHIGNHCANKLTAFKPTSSKSSSEATLSISPPRPTTLSLDLTKNTTEKLQPSSPKVYLYIQMQLCRKENLKDWMNGRCTIEERERSVCLHIFLQIAEAVEFLHSKGLMHRDLKPSNIFFTMDDVVKVGDFGLVTAMDQDEEEQTVLTPMPAYARHTGQVGTKLYMSPEQIHGNSYSHKVDIFSLGLILFELLYPFSTQMERVRTLTDVRNLKFPPLFTQKYPCEYVMVQDMLSPSPMERPEAINIIENAVFEDLDFPGKTVLRQRSRSLSSSGTKHSRQSNNSHSPLPSN

SEQ ID NO: 421 - DNA, 3522 bp, Human
aggggcgagtcctgcgcgagtccccgggaggcgccgcgcgcttggaagggacggtcgggcttccccggcccgctgagggctcggcggcgggctcccctcctttccacctcgggagggagggaaggaggggagggaaaagtcccacggaggaggcagaatggccagtcgaggggcgcttaggcgctgcctttccccagggctgcctcgactcctgcacctgtcccgagggctggcctgagacgggactcccggttctcccgctgcgaagcagcgcggccccccggggccggggcagcggcgccggcatgtcgtctggcaccatgaagttcaatggctatttgagggtccgcatcggtgaggcagtggggctgcagcccacccgctggtccctgcgccactcgctcttcaagaagggccaccagctgctggacccctatctgacggtgagcgtggaccaggtgcgcgtgggccagaccagcaccaagcagaagaccaacaaacccacgtacaacgaggagttttgcgctaacgtcaccgacggcggccacctcgagttggccgtcttccacgagacgcccctgggctacgaccacttcgtggccaactgcaccctgcagttccaggagctgctgcgcacgaccggcgcctcggacaccttcgagggttgggtggatctcgagccagaggggaaagtatttgtggtaataacccttaccgggagtttcactgaagctactctccagagagaccggatcttcaaacattttaccaggaagcgccaaagggctatgcgaaggcgagtccaccagatcaatggacacaagttcatggccacgtatctgaggcagcccacctactgctctcactgcagggagtttatctggggagtgtttgggaaacagggttatcagtgccaagtgtgcacctgtgtcgtccataaacgctgccatcatctaattgttacagcctgtacttgccaaaacaatattaacaaagtggattcaaagattgcagaacagaggttcgggatcaacatcccacacaagttcagcatccacaactacaaagtgccaacattctgcgatcactgtggctcactgctctggggaataatgcgacaaggacttcagtgtaaaatatgtaaaatgaatgtgcatattcgatgtcaagcgaacgtggcccctaactgtggggtaaatgcggtggaacttgccaagaccctggcagggatgggtctccaacccggaaatatttctccaacctcgaaactcgtttccagatcgaccctaagacgacagggaaaggagagcagcaaagaaggaaatgggattggggttaattcttccaaccgacttggtatcgacaactttgagttcatccgagtgttggggaaggggagttttgggaaggtgatgcttgcaagagtaaaagaaacaggagacctctatgctgtgaaggtgctgaagaaggacgtgattctgcaggatgatgatgtggaatgcaccatgaccgagaaaaggatcctgtctctggcccgcaatcaccccttcctcactcagttgttctgctgctttcagacccccgatcgtctgttttttgtgatggagtttgtgaatgggggtgacttgatgttccacattcagaagtctcgtcgttttgatgaagcacgagctcgcttctatgctgcagaaatcatttcggctctcatgttcctccatgataaaggaatcatctatagagatctgaaactggacaatgtcctgttggaccacgagggtcactgtaaactggcagacttcggaatgtgcaaggaggggatttgcaatggtgtcaccacggccacattctgtggcacgccagactatatcgctccagagatcctccaggaaatgctgtacgggcctgcagtagactggtgggcaatgggcgtgttgctctatgagatgctctgtggtcacgcgccttttgaggcagagaacgaagatgacctctttgaggccatactgaatgatgaggtggtctaccctacctggctccatgaagatgccacagggatcctaaaatctttcatgaccaagaaccccaccatgcgcttgggcagcctgactcagggaggcgagcacgccatcttgagacatcctttttttaaggaaatcgactgggcccagctgaaccatcgccaaatagaaccgcctttcagacccagaatcaaatcccgagaagatgtcagtaattttgaccctgacttcataaaggaagagccagttttaactccaattgatgagggacatcttccaatgattaaccaggatgagtttagaaacttttcctatgtgtctccagaattgcaaccatagccttatggggagtgagagagagggcacgagaacccaaagggaatagagattctccaggaatttcctctatgggaccttcccagcatcagccttagaacaagaaccttaccttcaaggagcaagtgaagaactctgtgaaggatggaactttcagatatcaactatttagagtccagagggagccatggcactagaaatagttgataatgaaatgagattttatgaagtataccgctccacctatgagcgtctgtctctgtgggcttgggatgttaacaggagccaaaaggagggaaagtgtgaagaataaagtagatctgagaaattctgagccaatcaggcttcttaattcaagagacaaaccaagacgttctgtcaactgtgctgtgctcttctttaagccaatgaaccccaattcctggcagtctacaagaagtctcttaatgctaatgaagaatttaaaggtctttttaaggaaatgaagggctttccaaatagaatgatttactctgaagaaacaaacaatggtatctctgaaactcacaacctaaagcccaatcttgaaaatatgttgtgcaccaagacgactgcttcagcttcttctcttatccttactttctttaatagatatttattaaactgtccagtgaaaaggtgccacaatgcccagtattgtaaacaacaggtttgcattcatgaagctttcattcattctggagtctactaatttacctgaatggtgtttgcattctgtgaaatgcctctccacgttgcatatgtcacacttttgtctgcacataactcttttttcacaagaagggtcactgccacaacagcacagtcagcgggtgaattacaggtgcctgctgcctgcctacctgggtaatctgatcttgtctgtatcgccgtgtgctcatcactgaagaattgcaggccactcatgtcagtgaccagatttgtggcttataaacattagcagtttatttatgttttaagatgcaaagatgtgtgtttgatattcactttaataattagaaatggatcttgtaaacagggcatatatcaaagatgaccttataatatgtacccgaatatacagttcaagaattttgtctgactggaaataaatgcattttgtagcaaaaggaaaaaaaaaaaaaaaaaa

SEQ ID NO: 422 - DNA, 3998 bp, Human
ccgggagcccgggcgccctggagtgaggaggaccgggagctggctctggaggctgcggaggcgacgccggagagaacgaagcctcggctgggagcggatctttcgaagatggtttggctgccttggagatttggagatctgatgccacgatgaggactcacacacggggggctcccagtgtgtttttcatatatttgctttgctttgtgtcagcctacatcaccgacgagaacccagaagttatgattcccttcaccaatgccaactacgacagccatcccatgctgtacttctccagggcagaagtggcggagctgcagctcagggctgccagctcgcacgagcacattgcagcccgcctcacggaggctgtgcacacgatgctgtccagccccttggaatacctccctccctgggatcccaaggactacagtgcccgctggaatgaaatttttggaaacaacttgggtgccttggcaatgttctgtgtgctgtatcctgagaacattgaagcccgagacatggccaaagactacatggagaggatggcagcgcagcctagttggttggtgaaagatgctccttgggatgaggtcccgcttgctcactccctggttggttttgccactgcttatgacttcttgtacaactacctgagcaagacacaacaggagaagtttcttgaagtgattgccaatgcctcagggtatatgtatgaaacttcatacaggagaggatggggatttcaatacctgcacaatcatcagcccaccaactgtatggctttgctcacgggaagcctagtcctgatgaatcaaggatatcttcaagaagcctacttatggaccaaacaagttctgaccatcatggagaaatctctggtcttgctcagggaggtgacggatggctccctctatgaaggagttgcgtatggcagctacaccactagatcactcttccaatacatgtttctcgtccagaggcacttcaacatcaaccactttggccatccgtggcttaaacaacactttgcatttatgtatagaaccatcctgccagggtttcaaaggactgtggctattgcggactcaaattacaactggttttatggtccagaaagccaattagtgttccttgataaatttgtcatgcgtaatggcagtggtaactggctagctgaccaaatcagaaggaaccgtgtggtggaaggtccaggaacaccatccaaagggcagcgctggtgcactctgcacacagaatttctctggtatgatggcagcttgaaatcggttcctcctccagactttggcacccctacactgcattattttgaagactggggtgtcgtgacttatggaagtgcactacctgcagaaatcaatagatctttcctttccttcaagtctggaaaactggggggacgtgcaatatatgacattgtccacagaaacaaatacaaagattggatcaaaggatggagaaattttaatgcagggcatgaacatcctgatcaaaactcatttacttttgctcccaatggtgtgcctttcattactgaggctctgtacgggccaaagtacaccttcttcaacaatgttttgatgttttccccagctgtgtcaaagagctgcttttctccctgggtgggtcaggtcacagaagactgctcatcaaaatggtctaaatacaagcatgacctggcagctagttgtcaggggagggtggttgcagcagaggagaaaaatggggtggttttcatccgaggagaaggtgtgggagcttataacccccagctcaacctgaagaatgttcagaggaatctcatcctcctacatccacagctgcttctccttgtagaccaaatacacctgggagaggagagtcccttggagacagcagcgagcttcttccataatgtggatgttccttttgaggagactgtggtagatggtgtccatggggctttcatcaggcagagagatggtctctataaaatgtactggatggacgatactggctacagcgagaaagcaacctttgcctcagtgacatatcctcggggctatccctacaacgggacaaactatgtgaatgtcaccatgcacctccgaagtcccatcaccagggcagcttacctcttcatagggccatctatagatgttcagagcttcactgtccacggagactctcagcaactggatgtgttcatagccaccagcaaacatgcctacgccacatacctgtggacaggtgaggccacaggacagtctgcctttgcacaggtcattgctgatcgtcacaaaattctgtttgaccggaattcagccatcaagagcagcattgtccctgaggtgaaggactatgctgctattgtggaacagaacttgcagcattttaaaccagtgtttcagctgctggagaagcagatactgtcccgagtccggaacacagctagctttaggaagactgctgaacgcctgctgagattttcagataagagacagactgaggaggccattgacaggatttttgccatatcacagcaacagcagcagcaaagcaagtcaaagaaaaaccgaagggcaggcaaacgctataaatttgtggatgctgtccctgatatttttgcacagattgaagtcaatgagaaaaagattagacagaaagctcagattttggcacagaaagaactacccatagatgaagatgaagaaatgaaagaccttttagattttgcagatgtaacatacgagaaacataaaaatgggggcttgattaaaggccggtttggacaggcacggatggtgacaactacacacagcagggccccatcactgtctgcttcctataccaggttgttcctgattctgaacattgctattttctttgtcatgttggcaatgcaactgacttatttccagagggcccagagcctacatggccaaagatgtctttatgcagttcttctcatagatagctgtattttattatggttgtactcttcttgttcccaatcacagtgttagcactgaagctataaattacctggtcattttgtgatcacaagagtctatgcaaaaaaaaaaatttctttaccccagattatcagatttttttccctcagattcattttaacaaattaagggaagatattttgacacaagaaagcaggaacgtggagaaattggagcaggaaaagaaattatcaaagcaatagaaatagcttggtggtcctatggtgtttttggaagtatttggcattgctaattgagcagtccatatagtactacttttagaagaaacaaaaagtctattttttaaagtaatgttttttcttatgagaaaaaggtttagatagaattgggttttattaatattaatttaatgctattagcaatttccatatactatattgtggaaaagactgaagaatacaattctgagaaatataaaaaaattttaatggtatactcatgttgaaagataaatgttgctaagtcctggtatgatggtgtgagcttccttggggaagtacttcttgagttatgtaactaacaggatgttttactacagatctggatggctattcagataacatggcaaaaaatgatagcagaagatcattaaaaacttaaaatatattttattagaaaacatttatctatgaatgaatatttccttgatgctggtctctgcacacatatgcttggttacttgcatgcattcattggttgttcaataagtgagatgattacagataatactgtattttccttatatggaaaaccgttatagacccaataacaactaaacctttcaaaagaaaatattttctattatgaatgttgattttcataccaaagaagatggagagtctaaaatttggatatgattcttatgtttttttaatagaaaaccttcttcaagtttattttcctaaataaacatcataattgtgaaaaaaaaaaaaaaaaaaaaaaaaaaaaaaaaaaaaaaaa

SEQ ID NO: 423 - protein, 958 aa, Human [sequence omitted]

SEQ ID NO: 424 - DNA, 3745 bp, Human
cggcggcgggcccaaggcgtgaggcgccgcccgggtgtccccgcggcgcaggaggcggtggagcgcagagcgggcgagcgcgaaaaatcactaccaatataatggattttatatatcagattgctttattctggatatcatggtaacaatacagaaagtatacataatttcccatttctgcaagtagtcatgactgctgaagaaagaaaaacttaaagctacggcagaattattttatggaaattctgattttgtttttaatttttgataactttttactaaaggtatgaacacacaaagagcttattttgttaggcaaatacacattaataagaatgcctagaagaggactgattcttcacacccggacccactggttgctgttgggccttgctttgctctgcagtttggtattatttatgtacctcctggaatgtgccccccagactgatggaaatgcatctcttcctggtgttgttggggaaaattatggtaaagagtattatcaagccctcctacaggaacaagaagaacattatcagaccagggcaaccagtctgaaacgccaaattgcccaactaaaacaagaattacaagaaatgagtgagaagatgcggtcactgcaagaaagaaggaatgtaggggctaatggcataggctatcagagcaacaaagagcaagcacctagtgatcttttagagtttcttcattcccaaattgacaaagctgaagttagcataggggccaaactacccagtgagtatggggtcattccctttgaaagttttaccttaatgaaagtatttcaattggaaatgggtctcactcgccatcctgaagaaaagccagttagaaaagacaaacgagatgaattggtggaagttattgaagcgggcttggaggtcattaataatcctgatgaagatgatgaacaagaagatgaggagggtccccttggagagaaactgatatttaatgaaaatgacttcgtagaaggttattatcgcactgagagagataagggcacacagtatgaactcttttttaagaaagcagaccttacggaatatagacatgtgaccctcttccgcccttttggacctctcatgaaagtgaagagtgagatgattgacatcactagatcaattattaatatcattgtgccacttgctgaaagaactgaagcatttgtacaatttatgcagaacttcagggatgtttgtattcatcaagacaagaagattcatctcacagtggtgtattttggtaaagaaggactgtctaaagtcaagtctatcctagaatctgtcaccagtgagtctaattttcacaattacaccttggtctcattgaatgaagaatttaatcgtggacgaggactaaatgtgggtgcccgagcttgggacaagggagaggtcttgatgtttttctgtgatgttgatatctatttctcagccgaattccttaacagctgccggttaaatgctgagccaggtaagaaggtgttttaccctgtggtgttcagtctttacaatcctgccattgtttatgccaaccaggaagtgccaccacctgtggagcagcagctggttcacaaaaaggattctggcttttggcgagattttggctttggaatgacttgtcagtatcgttcagatttcctgaccattggtggatttgacatggaagtgaaaggttggggtggagaagatgttcatctttatcgaaaatacttacatggtgacctcattgtgattcggactccggttcctggtcttttccacctctggcatgaaaagcgctgtgctgatgagctgacccccgagcagtaccgcatgtgcatccagtctaaagccatgaatgaggcctctcactcccacctgggaatgctggtcttcagggaggaaatagagacgcatcttcataaacaggcatacaggacaaacagtgaagctgttggttgaaatcataattaatgcgttactgtatgaaccacaaaacagcactatttatttagccttacttctacttccagatgcagtgcctcttttggagaagacatgtttatttttcatgttctttctgacattactttagcaattcaacttgatgtgagaagaaaaaacaaatgtttcaacacaaaatctctgttttgtgagaatactgcactatggaataattgacaaattgaaatctcatatttgtcccaaaagttgttttgagttagttctacctggtgcccatgttctgattgtgtgtgggattgcatggtgtcctgattgcatctaggtggagcggatggaatgtgctgggccactgttgggtggagagcagcacattcttacagaggagatggagcgttatgagcatagtatgtggataggtatcttcacctgcccgcccctgagtcagcctccttgacttgatagcttgaagaatccttttccactgaaatagaggataattaattgacacatctgaaatccccaatcaatcaatcaagagaaaggtagaactaaaaactccttaacttactgttgcttacacccctgaaagtctgtttttaagcaaatgggtaatagtagaaaataggttagaatctatggcttgattaaaaatatgttattacattatcatgttcaggattaggattagtagtcagttgctgtaaactattttgaacaaacagaaaagaacacggaaacatttttaacagagcatttaattatgttggaatacaggatcctagctctgtctgggaacattagtttatgtgagccagctctatcagggtcttcccatggtggttcagaatagatgagcatagcatggttttgtttgtttttgctttcaattttctaatttggcatggatccatatgtatttactatcctttttctaatatattaatatatgctacatttgtatttgcattactataatactttgagttgaaaaagagtttcattgtggagagaaaaagcaaatggtatgccacaagatcactctgatttgagaaaagggaggaggggaagatagtctgaatggaaatctgaaatacggaatgttttagagaaatatgtcacttgcatatagaatgttttaattgaggtataaattaatgagacaaagtgaaaaagaaattatattcagataggactgcactacattatttgtcacacatggatctgttaccatcaggtcaattcctagtatgcataaattttttaacccttttaaaagagacctatgttgaaaacccctgaaaattcactgaagaaaaatcattactctttttctcagtaaatcatatcatctgaaatattacaaatttcaaatttctaggtgctatattaattcaatattacaataactcttacctaattattcttacaagttttaagttgtggtagtttagtgatttttttaaaagatgtgtgaaatgttctctgcaaaataattcaggccactgtctccttttatatattattataattatttattatgaagaccagtgaattacgatatttaaagtgagagaacttaattatttgcaaaggtaagttacagcttgttttttgagagaatcaaatgagtttacttttgttcctgttgtttttaactagctttaagtttaaagatggaagctaagcaatggaaatgctatacgtttttgacatttattaaatggtaccaataaagtattttattaccaaaagttaaaaaaaaaaaaaaaaaaaaaaaa

SEQ ID NO: 425 - protein, 542 aa, Human
MPRRGLILHTRTHWLLLGLALLCSLVLFMYLLECAPQTDGNASLPGVVGENYGKEYYQALLQEQEEHYQTRATSLKRQIAQLKQELQEMSEKMRSLQERRNVGANGIGYQSNKEQAPSDLLEFLHSQIDKAEVSIGAKLPSEYGVIPFESFTLMKVFQLEMGLTRHPEEKPVRKDKRDELVEVIEAGLEVINNPDEDDEQEDEEGPLGEKLIFNENDFVEGYYRTERDKGTQYELFFKKADLTEYRHVTLFRPFGPLMKVKSEMIDITRSIINIIVPLAERTEAFVQFMQNFRDVCIHQDKKIHLTVVYFGKEGLSKVKSILESVTSESNFHNYTLVSLNEEFNRGRGLNVGARAWDKGEVLMFFCDVDIYFSAEFLNSCRLNAEPGKKVFYPVVFSLYNPAIVYANQEVPPPVEQQLVHKKDSGFWRDFGFGMTCQYRSDFLTIGGFDMEVKGWGGEDVHLYRKYLHGDLIVIRTPVPGLFHLWHEKRCADELTPEQYRMCIQSKAMNEASHSHLGMLVFREEIETHLHKQAYRTNSEAVG

SEQ ID NO: 426 - DNA, 1618 bp, Human
atgtcccggccgcagcttcgacgctggcgcctcgtctctagcccgccgagcggcgtcccgggtctagcgctgctggcgctgctggcgctgctggcgctgcggctcgcggccgggaccgactgcccatgcccggagcctgagctctgccgcccgattcgccaccatccagatttcgaggtctttgtgtttgatgttggacagaaaacttggaaatcttatgattggtcacagattacaactgtggcaacatttggaaaatatgactcagaacttatgtgctacgctcattcaaaaggagccagagtagtacttaaaggagatgtatccttaaaggatatcattgatcctgctttcagagcatcctggatagctcaaaaacttaatttggccaaaacacaatatatggatggaattaatatagatatagagcaagaagttaattgtttatcacctgaatatgatgcattaactgctttagtcaaagaaactacagactctttccatcgtgaaattgagggatcacaggtaacctttgatgtagcttggtctccaaagaacatagacagaagatgctataattatactggaatcgcagatgcttgtgacttcctctttgtgatgtcttatgatgaacaaagtcagatctggtcagaatgtattgcagcagccaatgctccctataatcagacattaactggatataatgactacatcaagatgagcattaatcctaagaaacttgtaatgggtgttccttggtatggttatgattatacctgcctgaatctgtctgaggatcatgtttgtaccattgcaaaagtccctttccggggggctccttgtagtgacgctgcaggacgtcaggtgccctacaaaacgatcatgaagcaaataaatagttctatttctggaaacctatgggataaagatcagcgggctccttattataactataaagatcctgctggccactttcatcaagtatggtatgataaccctcagagtatttctttaaaggcaacatatatacaaaactatcgcttacggggcattggcatgtggaatgcaaactgtcttgactactctggagatgctgtagccaaacagcaaactgaagaaatgtgggaagtcttaaagccaaagctgttacagagatgaacatcttttgtcaaaccattaagagttagaaagatgatctgtatcaacagatctagtttcttgcatttttattatgttgctatatacttttgttatccgtatactaaaaaaaaagaataaataaatgttttgattgtttgaatttgaaaaatacacacgaatgtcctcagtatccaggaacataaaggcaagaagcaagtcaacttacctattaaatattcctctattagatgtttcaacactataatttaattgggaaaaattgctttcagaattttattatgccatatttcccttcattatagtaaaatatatgctcacgaatcaatgctgatttttaaaatatgtataatctgaagtggaaattgtttgcttagagtttttaaaaacctagtctttgaaaagcagtttgtgctatacttttcccccaaccctccaataaatcttaaatttaaaacct

SEQ ID NO: 427 - protein, 385 aa, Human
MSRPQLRRWRLVSSPPSGVPGLALLALLALLALRLAAGTDCPCPEPELCRPIRHHPDFEVFVFDVGQKTWKSYDWSQITTVATFGKYDSELMCYAHSKGARVVLKGDVSLKDIIDPAFRASWIAQKLNLAKTQYMDGINIDIEQEVNCLSPEYDALTALVKETTDSFHREIEGSQVTFDVAWSPKNIDRRCYNYTGIADACDFLFVMSYDEQSQIWSECIAAANAPYNQTLTGYNDYIKMSINPKKLVMGVPWYGYDYTCLNLSEDHVCTIAKVPFRGAPCSDAAGRQVPYKTIMKQINSSISGNLWDKDQRAPYYNYKDPAGHFHQVWYDNPQSISLKATYIQNYRLRGIGMWNANCLDYSGDAVAKQQTEEMWEVLKPKLLQR

SEQ ID NO: 428 - DNA, 3244 bp, Human
agtgacaattaaagatggctgcgcccatgtaacatcactagcgaccggtgacctctttttcccccttgcctggctcctgtggtggcaggctgggcacgaggaccatgctgggccggagcctccgagaagtttctgcggcactgaaacaaggccaaattacaccaacagagctctgtcaaaaatgtctctctcttatcaagaaggccaagtttctaaatgcctacattactgtgtcagaagaggtggccttaaaacaagctgaagaatcagaaaagagatataagaatggacagtcacttggggatttagatggaattcctattgcagtaaaagacaatttcagcacttctggcattgagacaacatgtgcatcaaatatgctgaaaggttatataccaccttataatgctacagtagttcagaagttgttggatcagggagctctactaatgggaaaaacaaatttagatgagtttgctatgggatctgggagcacagatggtgtatttggaccagttaaaaacccctggagttattcaaaacgatatagagaaaagaggaagcagaatccccacagcgagaatgaagattcagactggctgataactggaggaagcccaggtgggagtgcagctgctgtatcggcgttcacatgctacgcggctttaggatcagatacaggaggatcgaccagaaatcctgctgcccactgtgggcttgttggtttcaaaccaagctatggcttagtttcccgtcatggtctcattcccctggtgaattcgatggatgtgccaggaatcttaaccagatgtgtggatgatgcagcaattgtgttgggtgcactggccggacctgaccccagggactctaccacagtacatgaacctattaataaaccattcatgcttcccagtttggcagatgtgagcaaactatgtataggaattccaaaggaatatcttgtaccggaattatcaagtgaagtacagtctctttggtccaaagctgctgacctctttgagtctgagggggccaaagtaattgaagtatcccttcctcacaccagttattcaattgtctgctaccatgtattgtgcacatcagaagtggcatcgaatatggcaagatttgatgggctacaatatggtcacagatgtgacattgatgtgtccactgaagccatgtatgctgcaaccagacgagaaggatttaatgatgtggtgagaggaagaattctctcaggaaactttttcttattaaaagaaaactatgaaaattattttgtcaaagcacagaaagtgagacgcctcattgctaatgactttgtaaatgcttttaactctggagtagatgtcttgctaactcccaccaccttgagtgaggcagtaccatacttggagttcatcaaagaggacaacagaacccgaagtgcccaggatgatatttttacacaagctgtaaatatggcaggattgccagcagtgagtatccctgttgcactctcaaaccaagggttgccaataggactgcagtttattggacgtgcgttttgtgaccagcagcttcttacagtagccaaatggtttgaaaaacaagtacagtttcctgttattcaacttcaagaactcatggatgattgttcagcagtccttgaaaatgaaaagttagcctctgtctctctaaaacagtaaacatatcttacaaattaaaatgacttttaggctgggtgcagtggctcacacctgtaatcccagcactttgggaggccaaggcgagcggatcatgaggtcagaagatctagaacagcctggtcaacatggtgaaaccccgtctctactaaaaatacaaaaattagccaggcttagtggcgggcatctgtagtcccagctactcaggaggctgaggcaggagaatcacttgaaccctggaggtggaggttgcagtgagccgagatcatgccactgcactgcactccagcctgggtgacaaagcaagactgtgtctcaaaataaataaataaaataaaataaaatgacgtacagagattctatattctagagagtcaaatggtcttgctcaattcttgtaattaggttcttgttaatacagtcattccatggaattactttttaaaattcctgtgacaattaataataaataacgtgtcagcatttagtaagcatccactaagtgtacaatacttctacaataacacaagatacctgttcctcaaagacaatgcattctgccataatgttcattaaagagtttacagtaaaaataagattagggataaacttctcaaaaattgtacatctgtgtaactaaagcactaacaaaaacatgaatagtccttctagaggtaacttggatagcctaggcaggcaacttatcatgtggtgaaggccgcctcaggggttgttaaaaatgcacagaaacaattgagtgcgattattggcttctgagcgctgagcagagcaggtggaagaggaactttgagcacaggaggaaatgcaaccagtcagggcccagaatcatgcaaatctcaggggtatgcctctctggggaggagctccacttgcagggactccttttatttccctaagaaagagctgaaatgactgagaactttcctttcctccttagagttacaattttacttctgctattccggagcccatgcctagaagccagaacaactccatgttacactgagttcatgctcctatttactgatcacaaatgagctcattaatgtcatcgaaacatttattgtaacctaacagaccatcacagattggaaacttggtagatagcagagcatggtattagtgaaaaaggttcaaaatacacaagtaacatacactctgaaaaacatgcagataatttgctgatgaagcagaagaggggatgcgcatggcaagaacttgccttaccccagattctctatatctcatggtttccttttcctcttgactgtctttacgagtgttttttatttgggaccctcgagcccagagatattaatggatatctgtattcaatatttgacaaaatctaatggaaaccatccatttactcatgataaggcttcatcactggatttctgtgtcttcactagaacaccattgtcatctcatattgatcaggtattttaatctagcacttacatattgttgataaatgaaagctgaattgttacttaataaattcactttgtttagcaaaaaaaaaaaaaaaaaaa

SEQ ID NO: 429 - protein, 528 aa, Human
MLGRSLREVSAALKQGQITPTELCQKCLSLIKKAKFLNAYITVSEEVALKQAEESEKRYKNGQSLGDLDGIPIAVKDNFSTSGIETTCASNMLKGYIPPYNATVVQKLLDQGALLMGKTNLDEFAMGSGSTDGVFGPVKNPWSYSKRYREKRKQNPHSENEDSDWLITGGSPGGSAAAVSAFTCYAALGSDTGGSTRNPAAHCGLVGFKPSYGLVSRHGLIPLVNSMDVPGILTRCVDDAAIVLGALAGPDPRDSTTVHEPINKPFMLPSLADVSKLCIGIPKEYLVPELSSEVQSLWSKAADLFESEGAKVIEVSLPHTSYSIVCYHVLCTSEVASNMARFDGLQYGHRCDIDVSTEAMYAATRREGFNDVVRGRILSGNFFLLKENYENYFVKAQKVRRLIANDFVNAFNSGVDVLLTPTTLSEAVPYLEFIKEDNRTRSAQDDIFTQAVNMAGLPAVSIPVALSNQGLPIGLQFIGRAFCDQQLLTVAKWFEKQVQFPVIQLQELMDDCSAVLENEKLASVSLKQ

SEQ ID NO: 430 - DNA, 2163 bp, Human
ggcagatgaaatataagattcatcaaccacatttgacagcccatggcaggtttcctgttttccatcgtccctctgcaggtcacagacacacagagcccagccgtggcaggctcagccggggtccggggctgctaacaacggctacattcctcccccagggccaagggaaatcctgagcgcaggccagggttgtttggttttgaggtgtgctgggatgaaaggcaccctggaagtggaaggtaaatgaacaatggaaaaacttcacggcaagattagaaagatacctgagcccaatacccgcctgatgtcgtgggccacacctccgggttaccaggggaagggaggaagcaaactgtcatattgatgtggctctaaacaacaacagtgtgcgaaggcccaggggcactttgggattgaccaagaggaaacacaagttgcacaatgatacaatcttgttggtacaattgtcagagaagggaactcccacagcaaaggccataaaaccatccagggcagtctggggcggctcagttctgcggtgccagggagtggagcagagctcagccccgtcccaaacacagatgggaccatgaactccggacacagcttcagccagaccccctcggcctccttccatggcgccggaggtggctggggccggcccaggagcttccccagggctcccaccgtccatggcggtgcggggggagcccgcatctccctgtccttcaccacgcggagctgcccaccccctggagggtcttggggttctggaagaagcagccccctactaggcggaaatgggaaggccaccatgcagaatctcaacgaccgcctggcctcctacctggagaaggttcgcgccctggaggaggccaacatgaagctggaaagccgcatcctgaaatggcaccagcagagagatcctggcagtaagaaagattattcccagtatgaggaaaacatcacacacctgcaggagcagatagtggatggtaagatgaccaatgctcagattattcttctcattgacaatgccaggatggcagtggatgacttcaacctcaagtatgaaaatgaacactcctttaagaaagacttggaaattgaagtcgagggcctccgaaggaccttagacaacctgaccattgtcacaacagacctagaacaggaggtggaaggaatgaggaaagagctcattctcatgaagaagcaccatgagcaggaaatggagaagcatcatgtgccaagtgacttcaatgtcaatgtgaaggtggatacaggtcccagggaagatctgattaaggtcctggaggatatgagacaagaatatgagcttataataaagaagaagcatcgagacttggacacttggtataaagaacagtctgcagccatgtcccaggaggcagccagtccagccactgtgcagagcagacaaggtgacatccacgaactgaagcgcacattccaggccctggagattgacctgcagacacagtacagcacgaaatctgctttggaaaacatgttatccgagacccagtctcggtactcctgcaagctccaggacatgcaagagatcatctcccactatgaggaggaactgacgcagctacgccatgaactggagcggcagaacaatgaataccaagtgctgctgggcatcaaaacccacctggagaaggaaatcaccacgtaccgacggctcctggagggagagagtgaagggacacgggaagaatcaaagtcgagcatgaaagtgtctgcaactccaaagatcaaggccataacccaggagaccatcaacggaagattagttctttgtcaagtgaatgaaatccaaaagcacgcatgagaccaatgaaagtttccgcctgttgtaaaatctattttcccccaaggaaagtccttgcacagacaccagtgagtgagttctaaaagatacccttggaattatcagactcagaaacttttattttttttttctgtaacagtctcaccagacttctcataatgctcttaatatattgcacttttctaatcaaagtgcgagtttatgagggtaaagctctactttcctactgcagccttcagattctcatcattttgcatctattttgtagccaataaaactccgcactagcaaaaaaaaaaaaaaaa

SEQ ID NO: 431 - protein, 422 aa, Human
MNSGHSFSQTPSASFHGAGGGWGRPRSFPRAPTVHGGAGGARISLSFTTRSCPPPGGSWGSGRSSPLLGGNGKATMQNLNDRLASYLEKVRALEEANMKLESRILKWHQQRDPGSKKDYSQYEENITHLQEQIVDGKMTNAQIILLIDNARMAVDDFNLKYENEHSFKKDLEIEVEGLRRTLDNLTIVTTDLEQEVEGMRKELILMKKHHEQEMEKHHVPSDFNVNVKVDTGPREDLIKVLEDMRQEYELIIKKKHRDLDTWYKEQSAAMSQEAASPATVQSRQGDIHELKRTFQALEIDLQTQYSTKSALENMLSETQSRYSCKLQDMQEIISHYEEELTQLRHELERQNNEYQVLLGIKTHLEKEITTYRRLLEGESEGTREESKSSMKVSATPKIKAITQETINGRLVLCQVNEIQKHA

SEQ ID NO: 432 - DNA, 2039 bp, Human
agcggggggttggcctctgcccggccacagagccggagctggaggtgctgtcccgtctggcggcgatccccgggcagggcccggggccggggtttgaagatgctgaacgtcccttcccagtctttcccggcccccaggtcgcagcagcgtgtcgcctccggggggcgtagcaaggtacctttaaaacagggcagaagccttatggattggattcgactgaccaaaagtggaaaggatctaacgggattaaaaggcaggttaattgaagtaactgaagaagaacttaagaaacacaacaaaaaagatgattgttggatatgcataagaggtttcgtttataatgtcagcccttatatggagtatcatcctggtggagaagatgaactaatgagagcagcaggatcagatggtactgaactttttgatcaggttcatcgttgggtcaattatgaatccatgctgaaagaatgcctggttggcagaatggccattaaacctgctgttctgaaagactatcgtgaggaggaaaagaaagtcttaaatggcatgcttcccaagagccaagtgacagatacacttgccaaagaaggtcctagttatccaagctatgattggttccaaacagactctttagtcaccattgccatatatactaaacagaaggatatcaatttagactcaataatagttgatcatcagaatgattcctttagagcagaaacaattattaaggattgtttatatcttatacatattgggctaagccatgaggttcaggaagatttttctgtgcgggttgttgagagtgtgggaaaaatagagattgttctacaaaaaaaagagaatacttcttgggactttcttggccatcccctgaagaatcataattcacttattccaaggaaagatacaggtttgtactacagaaagtgccagttaatttccaaggaagatgttactcatgatacgaggcttttctgtttgatgctgccaccaagcactcatcttcaagtgcccattgggcaacatgtttacctcaagctacctattacaggtacagaaatagtaaagccatatacacctgtatctggttccttactctcagagttcaaggaaccagttcttcccaacaataaatacatctactttttgataaaaatctatcccactggactcttcacaccagagcttgatcgtcttcagattggagattttgtttctgtaagcagtcctgagggcaattttaaaatatccaagttccaagaattagaagatctctttttgttggcagctggaacaggcttcacaccaatggttaaaatactgaattatgctttgactgatatacccagtctcaggaaagtgaagctgatgttcttcaataaaacagaagatgatataatttggagaagccaattggagaaattagcatttaaagataaaagactggatgttgaatttgttctctcagcacctatttctgaatggaatggcaaacagggacatatttcaccagctcttctttctgaatttttgaaaagaaatttggacaaatccaaagttctcgtctgcatttgtggaccagtgccatttacagaacaaggagtaaggttgctgcatgatctcaacttttccaaaaatgagatccatagttttacagcataatgaagagctgtcattgtcctttattcaactagtttatctaaatttgtgattgcttagggttttttaagagaacatttttgtacataacaaaaggttaactagaatccagccttcagtttcttaaatgaaatcaaatgttccttcagtacaggtaacttcttggctttcttttgtaccacaacttattttactactgatatttgacctggaaagttaatcatggcaacaaatacatacaggattctttgttatgaatcacaaatttccttgccatttaaattatatcactgttctacaataagcacttgtgttttatgacatgataaagtaaatgatcacttcgatcatgtttccatgcaaaaaaaaaaaaaaaa

SEQ ID NO: 433 - protein, 487 aa, Human
MDWIRLTKSGKDLTGLKGRLIEVTEEELKKHNKKDDCWICIRGFVYNVSPYMEYHPGGEDELMRAAGSDGTELFDQVHRWVNYESMLKECLVGRMAIKPAVLKDYREEEKKVLNGMLPKSQVTDTLAKEGPSYPSYDWFQTDSLVTIAIYTKQKDINLDSIIVDHQNDSFRAETIIKDCLYLIHIGLSHEVQEDFSVRVVESVGKIEIVLQKKENTSWDFLGHPLKNHNSLIPRKDTGLYYRKCQLISKEDVTHDTRLFCLMLPPSTHLQVPIGQHVYLKLPITGTEIVKPYTPVSGSLLSEFKEPVLPNNKYIYFLIKIYPTGLFTPELDRLQIGDFVSVSSPEGNFKISKFQELEDLFLLAAGTGFTPMVKILNYALTDIPSLRKVKLMFFNKTEDDIIWRSQLEKLAFKDKRLDVEFVLSAPISEWNGKQGHISPALLSEFLKRNLDKSKVLVCICGPVPFTEQGVRLLHDLNFSKNEIHSFTA

SEQ ID NO: 434 - DNA, 948 bp, Human
attgtggtgccttgtagctgtcccgggagccctcagcagcagttggagctggtgcacaggaaggatgaggaagaccaggctctgggggctgctgtggatgctctttgtctcagaactccgagctgcaactaaattaactgaggaaaagtatgaactgaaagaggggcagaccctggatgtgaaatgtgactacacgctagagaagtttgccagcagccagaaagcttggcagataataagggacggagagatgcccaagaccctggcatgcacagagaggccttcaaagaattcccatccagtccaagtggggaggatcatactagaagactaccatgatcatggtttactgcgcgtccgaatggtcaaccttcaagtggaagattctggactgtatcagtgtgtgatctaccagcctcccaaggagcctcacatgctgttcgatcgcatccgcttggtggtgaccaagggtttttcagggacccctggctccaatgagaattctacccagaatgtgtataagattcctcctaccaccactaaggccttgtgcccactctataccagccccagaactgtgacccaagctccacccaagtcaactgccgatgtctccactcctgactctgaaatcaaccttacaaatgtgacagatatcatcagggttccggtgttcaacattgtcattctcctggctggtggattcctgagtaagagcctggtcttctctgtcctgtttgctgtcacgctgaggtcatttgtaccctaggcccacgaacccacgagaatgtcctctgacttccagccacatccatctggcagttgtgccaagggaggagggaggaggtaaaaggcagggagttaataacatgaattaaatctgtaatcaccagctatttctaaagtcagcgtctcaccttaaaaaaaaaaaaaaaaaaaaaaaaaaaa

SEQ ID NO: 435 - DNA, 4521 bp, Human
cgggaagctgctggcagccctgctaacttctcctggttccgaaatggggtgctgtgggcccagggtcccctggagaccgtgacactgctgcccgtggccagaactgatgctgccctttacgcctgccgcatcctgactgaggctggtgcccagctctccactcccgtgctcctgagtgtactctatcccccggaccgtccaaagctgtcagccctcctagacatgggccagggccacatggctctgttcatctgcactgtggacagccgccccctggccttgctggccttgttccatggggagcacctcctggccaccagcctgggtccccaggtcccatcccatggtcggttccaggctaaggctgaggccaactccctgaagttagaggtccgagaactgggccttggggactctggcagctaccgctgtgaggccacaaatgttcttggatcatccaacacctcactcttcttccaggtccgaggagcctgggtccaggtgtcaccatcacctgagctccaagagggccaggctgtggtcctgagctgccaggtacacacaggagtcccagaggggacctcatatcgttggtatcgggatggccagcccctccaggagtcgacctcggccacgctccgctttgcagccataactttgacacaagctggggcctatcattgccaagcccaggccccaggctcagccaccacgagcctagctgcacccatcagcctccacgtgtcctatgccccacgccacgtcacactcactaccctgatggacacaggccctggacgactgggcctcctcctgtgccgtgtggacagtgaccctccggcccagctgcggctgctccacggggatcgccttgtggcctccaccctacaaggtgtggggggacccgaaggcagctctcccaggctgcatgtggctgtggcccccaacacactgcgtctggagatccacggggctatgctggaggatgagggtgtctatatctgtgaggcctccaacaccctgggccaggcctcggcctcagctgacttcgacgctcaagctgtgaatgtgcaggtgtggcccggggctaccgtgcgggaggggcagctggtgaacctgacctgccttgtgtggaccactcacccggcccagctcacctacacatggtaccaggatgggcagcagcgcctggatgcccactccatccccctgcccaacgtcacagtcagggatgccacctcctaccgctgcggtgtgggcccccctggtcgggcaccccgcctctccagacctatcaccttggacgtcctctacgcgccccgcaacctgcgcctgacctacctcctggagagccatggcgggcagctggccctggtactgtgcactgtggacagccgcccgcccgcccagctggccctcagccacgccggtcgcctcttggcctcctcgacagcagcctctgtccccaacaccctgcgcctggagctgcgagggccacagcccagggatgagggtttctacagctgctctgcccgcagccctctgggccaggccaacacgtccctggagctgcggctggagggtgtgcgggtgatcctggctccggaggctgccgtgcctgaaggtgcccccatcacagtgacctgtgcggaccctgctgcccacgcacccacactctatacttggtaccacaacggtcgttggctgcaggagggtccagctgcctcactctcattcctggtggccacgcgggctcatgcaggcgcctactcttgccaggcccaggatgcccagggcacccgcagctcccgtcctgctgccctgcaagtcctctatgcccctcaggacgctgtcctgtcctccttccgggactccagggccagatccatggctgtgatacagtgcactgtggacagtgagccacctgctgagctggccctatctcatgatggcaaggtgctggccacgagcagcggggtccacagcttggcatcagggacaggccatgtccaggtggcccgaaacgccctacggctgcaggtgcaagatgtgcctgcaggtgatgacacctatgtttgcacagcccaaaacttgctgggctcaatcagcaccatcgggcggttgcaggtagaaggtgcacgcgtggtggcagagcctggcctggacgtgcctgagggcgctgccctgaacctcagctgccgcctcctgggtggccctgggcctgtgggcaactccacctttgcatggttctggaatgaccggcggctgcacgcggagcctgtgcccactctcgccttcacccacgtggctcgtgctcaagctgggatgtaccactgcctggctgagctccccactggggctgctgcctctgctccagtcatgctccgtgtgctctaccctcccaagacgcccaccatgatggtcttcgtggagcctgagggtggcctccggggcatcctggattgccgagtggacagcgagccgctcgccagcctgactctccaccttggcagtcgactggtggcctccagtcagccccagggtgctcctgcagagccacacatccatgtcctggcttcccccaatgccctgagggtggacatcgaggcgctgaggcccagcgaccaaggggaatacatctgttctgcctcaaatgtcctgggctctgcctctacctccacctactttggggtcagagccctgcaccgcctgcatcagttccagcagctgctctgggtcctgggactgctggtgggcctcctgctcctgctgttgggcctgggggcctgctacacctggagaaggaggcgtgtttgtaagcagagcatgggcgagaattcggtggagatggcttttcagaaagagaccacgcagctcattgatcctgatgcagccacatgtgagacctcaacctgtgccccacccctgggctgaccagtggtgttgcctgccctccggaggagaaagtggccagaatctgtgatgactccagcctatgaatgtgaatgaggcagtgttgagtcctgcccgcctctacgaaaacagctctgtgacatctgactttttatgacctggccccaagcctcttgcccccccaaaaatgggtggtgagaggtctgcccaggagggtgttgaccctggaggacactgaagagcactgagctgatctcgctctctcttctctggatctcctcccttctctccatttctccctcaaaggaagccctgccctttcacatccttctcctcgaaagtcaccctggactttggttggattgcagcatcctgcatcctcagaggctcaccaaggcattctgtattcaacagagtatcagtcagcctgctctaacaagagaccaaatacagtgacttcaacatgatagaattttatttttctctcccacgctagtctggctgttacgatggtttatgatgttggggctcaggatccttctatcttccttttctctatccctaaaatgatgcctttgattgtgaggctcaccatggccccgctttgtccacatgccctccagccagaagaaggaagagtggaggtagaagcacacccatgcccatggtggacgcaactcagaagctgcacaggacttttccactcacttcccattggctggagtattgtcacatggctactgcaagctacaagggagactgggaaatgtagtttttattttgagtccagaggacatttggaattggacttccaaaggactcccaactgtgagctcatccctgagacttttgacattgttgggaatgccaccagcaggccatgttttgtctcagtgcccatctactgagggccagggtgtgcccctggccattctggttgtgggcttcctggaagaggtgatcactctcacactaagactgaggaaataaaaaaggtttggtgttttcctagggagagagcatgccaggcagtggagttgcctaagcagacatccttgtgccagatttggcccctgaaagaagagatgccctcattcccaccaccaccccccctacccccagggactgggtactaccttactggcccttacaagagtggagggcagacacagatgttgtcagcatccttattcctgctccagatgcatctctgttcatgactgtgtgagctcctgtccttttcctggagaccctgtgtcgggctgttaaagagaatgagttaccaagaaggaatgacgtgcccctgcgaatcagggaccaacaggagagagctcttgagtgggctagtgactccccctgcagcctggtggagatggtgtgaggagcgaagagccctctgctctaggatttgggttgaaaaacagagagagaagtggggagttgccacaggagctaacacgctgggaggcagttgggggcgggtgaactttgtgtagccgaggccgcaccctccctcattccaggctcattcattttcatgctccattgccagactcttgctgggagcccgtccagaatgtcctcccaataaaactccatcctatgacg

SEQ ID NO: 436 - DNA, 1508 bp, Human
gctggaggagcctcgaggctgaggctgccggggggctgtgggctaccgggccgccggcgcctcagcgatgttttactcagggctcctcactgagggcggccgcaaggagaccgacatgcgggaggcggcgtcactgcgacagcagcgccggatgaagcaggcggtgcagttcatccacaaggactccgccgacctgctgcccctggacggcctcaagaagctgggctcgtccaaggacatgcaacctcataatattctgcagaggcgcctcatggaaaccaacctgtctaagctccgaagcggtccccgtgtcccttgggcctctaagacgaacaaactcaatcaggctaagtctgaggggctaaagaagtctgaggaggatgacatgattttggtttcttgccagtgtgctggaaaggatgtgaaagccttggttgacacaggctgcctatataatctcatctctttggcctgtgtggacagattgggactcaaggagcatgtcaaatcccacaagcatgaaggagaaaagctttctctaccccggcatctcaaagtagtgggccagattgagcacctagtgatcacactgggctccctccgcctggactgcccagcagctgtggttgatgacaatgagaaaaacttgtcccttggtctacagactctccgatctctgaagtgcatcataaacttggataagcaccggctgatcatggggaagacagacaaggaagaaatcccttttgtggagacagtctctttgaatgaagacaacacttcagaagcataactacagcctgcagcatgtctgcacgtgtgcatgcatacacaccgggttgacagattgagaaaactgggtttgaaccaaatgccgtagtgacttgctgtggaccaagtccttccatctaatagaagctccaggggctccttcccattcagacctctctagactatagtctatgcttagagatcttgtctggttatggccattgttttttactactttgatcacttaacttatagaccttttttgacactgccagtctcacttgtggcctatttctctgcttcttccaggaatttgcttttattagtcaagtataggggctgccaggttctgtgtctccatagatatatgtgcttcttttcctatagctaaatgtataataaacaggaacctgacctttacctcctttcagctgtttcaaacaggtgccaggatacctatgtcttagaattagagtttcttcaaattgattcattgatttctcaagtatggattatgtgaaagagcccagggacattatccattacagtctaactctttcatttaaaggtccagagaggcaagtgaattgtctaagttcatatattaggtcagtgactgaagggaccaagaacgcagacctgatttccaagccaagactcccatgctgcctcatttgtattcaagcctttaacaggagggcaaagaggtgagaatgtgttaaaaaaaaaaaaaaaaa

SEQ ID NO: 437 - protein, 241 aa, Human
MFYSGLLTEGGRKETDMREAASLRQQRRMKQAVQFIHKDSADLLPLDGLKKLGSSKDMQPHNILQRRLMETNLSKLRSGPRVPWASKTNKLNQAKSEGLKKSEEDDMILVSCQCAGKDVKALVDTGCLYNLISLACVDRLGLKEHVKSHKHEGEKLSLPRHLKVVGQIEHLVITLGSLRLDCPAAVVDDNEKNLSLGLQTLRSLKCIINLDKHRLIMGKTDKEEIPFVETVSLNEDNTSEA

SEQ ID NO: 438 - DNA, 1432 bp, Human
ttttactgaagttgctagaagtttacagaaaaggaagtgcaggaacatttcacaaatctacaatctgtgagtatcacatcctgtatagctgtaaacactggaataaggaagggctgatgactttcagaagatgaaggtaagtagaaaccgttgatgggactgagaaaccagagttaaaacctctttggagcttctgaggactcagctggaaccaacgggcacagttggcaacaccatcatgacatcacaacctgttcccaatgagaccatcatagtgctcccatcaaatgtcatcaacttctcccaagcagagaaacccgaacccaccaaccaggggcaggatagcctgaagaaacatctacacgcagaaatcaaagttattgggactatccagatcttgtgtggcatgatggtattgagcttggggatcattttggcatctgcttccttctctccaaattttacccaagtgacttctacactgttgaactctgcttacccattcataggaccctttttttttatcatctctggctctctatcaatcgccacagagaaaaggttaaccaagcttttggtgcatagcagcctggttggaagcattctgagtgctctgtctgccctggtgggtttcattatcctgtctgtcaaacaggccaccttaaatcctgcctcactgcagtgtgagttggacaaaaataatataccaacaagaagttatgtttcttacttttatcatgattcactttataccacggactgctatacagccaaagccagtctggctggaactctctctctgatgctgatttgcactctgctggaattctgcctagctgtgctcactgctgtgctgcggtggaaacaggcttactctgacttccctggggtgagtgtgctggccggcttcacttaaccttgcctagtgtatcttatccctgcactgtgttgagtatgtcaccaagagtggtagaaggaacaaccagccaatcacgagatacacatgggagggcatttgcattgtgatggaagacagagaagaaaagcagatggcaattgagtagctgataagctgaaaattcactggatatgaaaatagttaatcatgagaaatcaactgattcaatcttcctattttgtcagcgaagggaatgagactctgggaagttaaatgactggcctggcattatgctatgagtttgtgcctttgctgaggacactagaacctggcttgcctcccttataagcagaaacaatttctgccacaaccactagtctctttaatagtattgacttggtaaagggcatttacacacgtaactggatccagtgaatgtcttatgctctgcatttgcccctggtgatcttaaaattcgtttgcctttttaaagctatattaaaaatgtattgttgaatcaaaaaaaaaaaaaaa

SEQ ID NO: 439 - DNA, 1218 bp, Human
acacaacttcagctgaggaacttggcacggccagcttgggacccaggaccctaacgcagaggcgctgtgtttggaagtcccgctatcacggccccccagatggggcctggacgatgcctcctgacggccttgttgcttctggccctggcgccaccgccggaagcctcccagtactgcggccgccttgaatactggaacccagacaacaagtgctgcagcagctgcctgcaacgcttcgggccgcccccctgcccggactatgagttccgggaaaactgcggactcaatgaccacggcgatttcgtaacgcccccgttccgaaagtgttcttctgggcagtgcaaccccgacggcgcggagctatgtagcccctgcggcggcggagccgtgacccctactcccgccgcgggcgggggcagaaccccgtggcgctgcagagagaggccggtccctgccaaggggcactgccccctcacacctggaaacccaggcgcccctagctcccaggagcgcagctcaccagcaagttccattgcctggaggacccctgagcctgtccctcagcaggcctggccgaatttccttccgctcgtggtgctggtcctgctcctgaccttggcggtgatagcgatcctcctgtttattctgctctggcatctctgctggcccaaggagaaagccgacccctatccctatcctggcttggtctgcggagtccccaacacccacaccccttcctcctcgcatctgtcctccccaggcgccctggagacaggggacacatggaaggaggcctcactacttccactcctgagcagggaactgtccagtctggcgtcacaacccctgtctcgcctcctggatgagctggaggtgctggaagagctgattgtactgctggaccctgagcctgggccaggtgggggtatggcccatggcactactcgacacctggccgcaagatatgggctgcctgctgcctggtccacctttgcctattcgctgaggccgagtcgctcgccgctgcgggctctgattgagatggtggtggcaagggagccctctgcctccctgggccagcttggcacacacctcgcccagctagggcgggcagatgcattgcgggtgctgtccaagcttggctcatctggggtttgctgggcttaacacccaataaagaactttgctgactactaaaaaaaaaaaaaaaaaaaaaaa

SEQ ID NO: 440 - protein, 355 aa, Human
MGPGRCLLTALLLLALAPPPEASQYCGRLEYWNPDNKCCSSCLQRFGPPPCPDYEFRENCGLNDHGDFVTPPFRKCSSGQCNPDGAELCSPCGGGAVTPTPAAGGGRTPWRCRERPVPAKGHCPLTPGNPGAPSSQERSSPASSIAWRTPEPVPQQAWPNFLPLVVLVLLLTLAVIAILLFILLWHLCWPKEKADPYPYPGLVCGVPNTHTPSSSHLSSPGALETGDTWKEASLLPLLSRELSSLASQPLSRLLDELEVLEELIVLLDPEPGPGGGMAHGTTRHLAARYGLPAAWSTFAYSLRPSRSPLRALIEMVVAREPSASLGQLGTHLAQLGRADALRVLSKLGSSGVCWA

SEQ ID NO: 441 - DNA, 2653 bp, Human
ggattccggctcccgcggctgcaggcgcgcggctagagtgcctggcgggctccggcttccgcgtccgccccggccccggtccagacttagtcttcagctccgcgcccgctccgccgcggcccaccgcgcccgccggcagccgagcccccagcgacgcccgcacagctccgggtgcccagacagggggccatgccgtgccggagggaggaggaagaggaagccggcgaggaggcggagggggaggaagaggaggaggacagcttcctcctactgcagcagtcagtggcgctgggcagctcgggcgaggtggaccggctggtggcccagatcggcgagacgctgcagctggacgcggcgcagcacagcccggcctcgccgtgcgggcccccgggggcgccgctgcgggccccggggcccctggctgcggcggtgccggcggacaaggccaggtccccggcggtgccgctgctgctgccgcccgcgttggcggagactgtgggcccggcgccccctggggtcctgcgctgcgccctgggggaccgcggccgcgtgcggggccgcgctgcgccctactgcgtggccgagctcgccacaggccccagcgcgctgtccccactgccccctcaggccgaccttgatgggcctccgggagctggcaagcagggcatcccgcagccgctgtcgggtccgtgccggcgaggatggctccggggcgccgccgcctcccgccgcctgcagcagcgacgcgggtcccaaccagaaacccgcacaggcgacgacgacccgcaccggcttctgcagcagctagtgctctctggaaacctcatcaaggaggccgtgcgaaggcttcattcgcgacggctgcagttacgtgcaaagcttccccaacgcccgctcctgggacctctgtcggccccggtgcatgaacccccttcgcctcgcagccctcgcgcggcctgcagtgaccctggcgcctccgggagggcgcagctcagaactggcgacggcgttcttgtgcctggcagctaacacgcccggggtggccacagcgccagcctcagactggagggcaaggggttcccttgagggctgcagttctactcaggctggtggagaactctggcttttggaagcgagagtaaaaagctaatgacgaggaaccgaaaaatcgcgagtgtttcgcgggtaactggggttgagggccaaaatatttggaatgaaggacttggccctatttaaggcagattttacagagcgcacctcaaacgtacaagtcagtaggactccttatttggcgtgacccgacctggccgcggagcctgcatttcctcgcagcctctcagtgccctccagccccgcgaccatgtggccacaatccacgcttctccggatcgcggtgcgccggaaccacggaggatgatgccagttacttgctttaccttttcagggctggctcctgatccactttgggggaggagaacatgagtagataatttcagggtgcagcccaatctgccagacttaaaaaaaccatcttgtgtctttggaggtgctgcttaataccaaacatgcggtgccatgaagggaccctttgggggttgaataggagttaacccctgcgctctctttgcaactgtctctcttctcagagtggtgggggaaggctgtacgacacgggtggggaaaggaggtgggggcggggagtattgaatggtggtggaagggtagagaggcgcggagtgaaccccacgccctgtctaaagtgtattttcagagccggcccgcctctcctcggttcaaggtcactgtttcctgggcacgcactgggttgcgggacagagtagccaggttctgccggtgctcggagaagagcgcagtgttttgcaagtgctggagtctcctgaggacacgcgcgtcgccgccaccgcgggtgtgggaaagcgcggacgtgctgggcggctgtgcttcggtaggcgaccaccgcccctggccgcgctccgggctttcacggaaactcccgagaccgggccctgggttcctcctctcctactcggctctgcagtcctactcaagcgggtggctctgggatcctgggggcctgggttgggggctagggagacgccatgtgatggacactccagggacacacagcctagcacagcagcttataatgggctctccggggccatttgcaataacagctgcaattccctggatagacgagttgatttcctccctctgcccctcccccagccatgccagctggcctttgtaagtgcaggaaaccgagtagaaaatgtgaccctccaaatggagaagctgcaggctttgccattgtgaaccatggtgaagtgcttggaacatactgttcactcactctaaaggcgctgagactgtgctgttgttctcgtttttatagtcaatggcttgttcatcatccagatgtggctactgacatatctacacttcgcaccggagtgtctggaattgtggctatcctgattataggattttaacttaactgaaatgcctgctttgaataaatgtgttgggttttttgtttggttttattttatacttgccatcagtgaaaaagatgtacagaacacatttctctgatctccataaacatgaaaacacttgaaatctcaaa

SEQ ID NO: 442 - DNA, 1291 bp, Human
ctgtgattctcactatactggtcctgaggaaagggcttctgtgaactgcggtttttagtttttattgtggttcttagttctcatgagacccctcttgaggatatgtgcctatctggtgcctctgctctccactagttgagtgaaaggaaggaggtaatttaccaccatgtttggttcctgtttataagatgttttaagaaagatttgaaacagattttctgaagaaagcagaagctctcttcccattatgacttcggaaatcacttatgctgaagtgaggttcaaaaatgaattcaagtcctcaggcatcaacacagcctcttctgcagcttccaaggagaggactgcccctcacaaaagtaataccggattccccaagctgctttgtgcctcactgttgatatttttcctgctattggcaatctcattctttattgcttttgtcattttctttcaaaaatattctcagcttcttgaaaaaaagactacaaaagagctggttcatacaacattggagtgtgtgaaaaaaaatatgcccgtggaagagacagcctggagctgttgcccaaagaattggaagtcatttagttccaactgctactttatttctactgaatcagcatcttggcaagacagtgagaaggactgtgctagaatggaggctcacctgctggtgataaacactcaagaagagcaggatttcatcttccagaatctgcaagaagaatctgcttattttgtggggctctcagatccagaaggtcagcgacattggcaatgggttgatcagacaccatacaatgaaagttccacattctggcatccacgtgagcccagtgatcccaatgagcgctgcgttgtgctaaattttcgtaaatcacccaaaagatggggctggaatgatgttaattgtcttggtcctcaaaggtcagtttgtgagatgatgaagatccacttatgaactgaacattctccatgaacaggtggttggattggtatctgtcattgtagggatagataataagctcttcttattcatgtgtaagggaggtccatagaatttaggtggtctgtcaactattctacttatgagagaattggtctgtacattgactgattcactttttcataaagtgagcatttattgagcattttttcatgtgccagagcctgtactggaggcccccattgtgcacacatggagagaacatgagtctctcttaatttttatctggttgctaaagaattatttaccaataaaattatatgatgtggtgtctcaaaaaaaaaa

SEQ ID NO: 443 - DNA, 340 bp, Human
attatgctttctattttgagatcattgcaaactcaacacaattgtaagtaatgatacagagggatcttgtgtacccttcacccagcctcccccaatggcaacatcttgcaaaactacaatgtagtctcataaccaggatattgacattgatacagtgaagatacaggacattctcatcaccacagggatccccaggatgcccacttccctccacccccacaccccagccgtgtccctaacccctggcaaccaggaatccactctccatttctataatgttgtcatttcaagaatgttattcaatggaatcatatagtatgtaacctgttttgagcttaaa

SEQ ID NO: 444 - DNA, 2487 bp, Human
ctgagcgccctccgctcgccccgagagagacccggccatgcaggagccgctgctgggagccgagggcccggactacgacaccttccccgagaagccgcccccgtcgccaggggacagggcgcgggtcgggaccctgcagaacaaaagggtgttcctggccaccttcgccgcagtgctcggcaatttcagctttgggtatgccctggtctacacatcccctgtcatcccagccctggagcgctccttggatcctgacctgcatctgaccaaatcccaggcatcctggtttgggtccgtgttcaccctgggagcagcggccggaggcctgagtgccatgatcctcaacgacctcctgggccggaagctgagcatcatgttctcagctgtgccgtcggcggccggctatgcgctcatggcgggtgcgcacggcctctggatgctgctgctcggaaggacgctgacgggcttcgccggggggctcacagctgcctgcatcccggtgtacgtgtctgagattgctcccccaggcgttcgtggggctctgggggccacaccccagctcatggcagtgttcggatccctgtccctctacgcccttggcctcctgctgccgtggcgctggctggctgtggccggggaggcgcctgtgctcatcatgatcctgctgctcagcttcatgcccaactcgccgcgcttcctgctctctcggggcagggacgaagaggccctgcgggcgctggcctggctgcgtgggacggacgtcgatgtccactgggagttcgagcagatccaggacaacgtccggagacagagcagccgagtatcgtgggctgaggcacgggccccacacgtgtgccggcccatcaccgtggccttgctgatgcgcctcctgcagcagctgacgggcatcacgcccatcctggtctacctgcagtccatcttcgacagcaccgctgtcctgctgccccccaaggacgacgcagccatcgttggggccgtgcggctcctgtccgtgctgatcgccgccctcaccatggacctcgcaggccgcaaggtgctgctcttcgtctcagcggccatcatgtttgctgccaacctgactctggggctgtacatccactttggccccaggcctctgagccccaacagcactgcgggcctggaaagcgagtcctggggggacttggcgcagcccctggcagcacccgctggctacctcaccctggtgcccctgctggccaccatgctcttcatcatgggctacgccgtgggctggggtcccatcacctggctgctcatgtctgaggtcctgcccctgcgtgcccgtggcgtggcctcagggctctgcgtgctggccagctggctcaccgccttcgtcctcaccaagtccttcctgccagtggtgagcaccttcggcctccaggtgcctttcttcttcttcgcggccatctgcttggtgagcctggtgttcacaggctgctgtgtgcccgagaccaagggacggtccctggagcagatcgagtccttcttccgcatggggagaaggtccttcttgcgctaggtcaaggtccccgcctggagggggccaaacccccagtggctgggcctctgtgttggctacaaacctgcaccctgggaccaagaggcagcagtcatccctgccaccagccagagcacaggaagagcagtgtgatggggcctcagcagcgggtgcccctggctcgggacaggtagcactgctgtccagccacagccccagcccaggcagcccacagtgctgcacgtagccatgggccgcaggagtgcatacaaccctgcatccagggacacggccctgctgggtgacctcaggcctagtccctttcccttgcgtgaaggacacgccccacagaaggctacggggaggactgagaggacagggctggaggcagccaagtaacgtagtcatatcatcgcgctctgatctggtggcatctggctgtgcaaggaagacccggctttgccctcacaagtcttatgggcaccacagggaacatcctggacttaaaaagccagggcaggccgggcacagtggctcacgcctgtaatcccagcactttgggaggccaaagcaggtggattacccaaggccaggagttcaagaccagcctggccaacatggtgaaaccccgtctctactaaaaaatacaaaaaagctgggtgtggtggcacacacccgtagttccagctacttgggaggctgaggcagcattgcttgaacccgggaggtggaggctgcaatgagctgagatcatgccattgcactccagcctgggcaacgagagtgaaactccgtccccaccccctgccaaaaaaaaaaaaaaaaaagccagggcaaaggacctggcgtggccacttcctcctgccccagcccaacctctgggaacaggcagctcctatctgcaaactgtgttcacccttttgtaaaaataaaggaactggacccgt

SEQ ID NO: 445 - protein, 507 aa, Human
MQEPLLGAEGPDYDTFPEKPPPSPGDRARVGTLQNKRVFLATFAAVLGNFSFGYALVYTSPVIPALERSLDPDLHLTKSQASWFGSVFTLGAAAGGLSAMILNDLLGRKLSIMFSAVPSAAGYALMAGAHGLWMLLLGRTLTGFAGGLTAACIPVYVSEIAPPGVRGALGATPQLMAVFGSLSLYALGLLLPWRWLAVAGEAPVLIMILLLSFMPNSPRFLLSRGRDEEALRALAWLRGTDVDVHWEFEQIQDNVRRQSSRVSWAEARAPHVCRPITVALLMRLLQQLTGITPILVYLQSIFDSTAVLLPPKDDAAIVGAVRLLSVLIAALTMDLAGRKVLLFVSAAIMFAANLTLGLYIHFGPRPLSPNSTAGLESESWGDLAQPLAAPAGYLTLVPLLATMLFIMGYAVGWGPITWLLMSEVLPLRARGVASGLCVLASWLTAFVLTKSFLPVVSTFGLQVPFFFFAAICLVSLVFTGCCVPETKGRSLEQIESFFRMGRRSFLR

SEQ ID NO: 446 - DNA, 2021 bp, Human
agccatatgggggatacgccagcaacagacgccggccgccaagatctgcatccctaggccacgctaagaccctggggaagagcgcaggagcccgggagaagggctggaaggaggggactggacgtgcggagaattcccccctaaaaggcagaagcccccgcccccaccctcgagctccgctcgggcagagcgcctgcctgcctgccgctgctgcgggcgcccacctcgcccagccatgccaggcccggccaccgacgcggggaagatccctttctgcgacgccaaggaagaaatccgtgccgggctcgaaagctctgagggcggcggcggcccggagaggccaggcgcgcgcgggcagcggcagaacatcgtctggaggaatgtcgtcctgatgagcttgctccacttgggggccgtgtactccctggtgctcatccccaaagccaagccactcactctgctctgggcctacttctgcctcctcctggccgctctgggtgtgacagctggtgcccatcgcttgtggagccacaggtcctaccgggccaagctgcctctgaggatatttctggctgtcgccaactccatggctttccagaatgacatcttcgagcggtccagggaccaccgagcccaccacaagtactcagagacggatgctgacccccacaatgcccgccggggcttcttcttctcccatattgggtggctgtttgttcgcaagcatcgagatgttattgagaaggggagaaagcttgacgtcactgacctgcttgctgatcctgtggtccggatccagagaaatacacagcacatccagaaagaaggaagagctctcaatcaagaggcagcgtgtgagatgcttcgtgagtggcatcaagggcatatattgaaagtcacccttcccggattacacattttagctttgttacatactcattgtaaccactccgaaaagtgctgcttgatgctgcgtgctctttctgtgtccctggaggtattctgaaggtcagaagagagatatacaacagcgaggcttggtgataacgtatagaataacagacggggactccacacccaggccttttttaacggtgtgaagcatagacagagctgcagtctgtgctaacattaggttatttattgattcaatcagttgacacaaggaggcagctacggggaggtaaaatatggtcctaaaatcaaaaagatttcagttttgtcattctgtctctgagattctatttccacatctagagcagggtaataatgatacctaccttacaaaattattgggagaatacattagttaatatatgtgaaagtatggaggagatgtgcaataaatatttgtgttattaactacacatacagcactctataggagatattccatttataaaaactttaggttctaaaaacctgtacacgttgattatttttgtaagtcaaaagtgattaagaggagtttaagctatcatttccagatgtatttctataaataaaaacataagtatattcagttgatttggggtggagagttccatagatgtctgttaggtccgcttggtccagagctgagttcaagtcctgaatatccttgttaattttctgtcttgttgatctgtctaatattgacagtggggtattaaagtctcccactattattatatgggagtctaagtctccttgtaggtctctaagaacttgctttatgaatctgggtgctcctgtattaggtgcatacatatttaggatagttagctcttcttgctgcattgatcccattaccattatataatgcccttctttgtcttttttgatctttgttggtttaaagtctgttttattagagactaggattgcaacccctgctatttttttttttttttttgcttgataaatattcctgtatccctttattttgagcctatatgtgtctttgcacgtgaggtgggtctcctgaatacagcacaccgatgggttttgactctaaaaaaaaaaaaaaaaaaaaaaaaaaa

SEQ ID NO: 447 - protein, 256 aa, Human
MPGPATDAGKIPFCDAKEEIRAGLESSEGGGGPERPGARGQRQNIVWRNVVLMSLLHLGAVYSLVLIPKAKPLTLLWAYFCLLLAALGVTAGAHRLWSHRSYRAKLPLRIFLAVANSMAFQNDIFERSRDHRAHHKYSETDADPHNARRGFFFSHIGWLFVRKHRDVIEKGRKLDVTDLLADPVVRIQRNTQHIQKEGRALNQEAACEMLREWHQGHILKVTLPGLHILALLHTHCNHSEKCCLMLRALSVSLEVF

SEQ ID NO: 448 - DNA, 543 bp, Human
cattggggtgaactctgcctaggaaaattgtcagtcaaaagcaacctgcagccctggagggactgcaaaggtcagtgccgccatcgaggacttggaagatgcagggtggtgacccccactgcagcctcgttccactcgtctaattggcttgtgtggaagacaggggggtcccggagaaagaaggacagtgaatcctggtaaacttaaccaggactccaattgcaactgctgttccagatatgactactgatcactggggcaaatcaaagcatccccggacacctggtctacagccattgatctggcgaaagctttaatttttaataaagattttattttttagagcagtttcatgtttacagagaaattgagcatatttgagagtcctcatatagcatctctccctacacacagtttcccttattattcatatcttgaattactgtgatacatctttgcaattgatgaaccaatattgacctagtcattgatcaggttacatgagggttcactcttcttgttgtacatgctgtgagttcgggc

SEQ ID NO: 449 - DNA, 1242 bp, Human
atttcatgttatacttaataaaacaaaacatacctgtatacacacacattcactcacattgaagatgcaagatgaagaaagatacatgacattgaatgtacagtcaaagaaaaggagttctgcccaaacatctcaacttacatttaaagattattcagtgacgttgcactggtataaaatcttactgggaatatctggaaccgtgaatggtattctcactttgactttgatctccttgatcctgttggtttctcagggagtattgctaaaatgccaaaaaggaagttgttcaaatgccactcagtatgaggacactggagatctaaaagtgaataatggcacaagaagaaatataagtaataaggacctttgtgcttcgagatctgcagaccagacagtactatgccaatcagaatggctcaaataccaagggaagtgttattggttctctaatgagatgaaaagctggagtgacagttatgtgtattgtttggaaagaaaatctcatctactaatcatacatgaccaacttgaaatggcttttatacagaaaaacctaagacaattaaactacgtatggattgggcttaactttacctccttgaaaatgacatggacttgggtggatggttctccaatagattcaaagatattcttcataaagggaccagctaaagaaaacagctgtgctgccattaaggaaagcaaaattttctctgaaacctgcagcagtgttttcaaatggatttgtcagtattagagtttgacaaaattcacagtgaaataatcaatgatcactatttttggcctattagtttctaatattaatctccaggtgtaagattttaaagtgcaattaaatgccaaaatctcttctcccttctccctccatcatcgacactggtctagcctcagagtaacccctgttaacaaactaaaatgtacacttcaaaatttttacgtgatagtataaaccaatgtgacttcatgtgatcatatccaggatttttattcgtcgcttattttatgccaaatgtgatcaaattatgcctgtttttctgtatcttgcgttttaaattcttaataaggtcctaaacaaaatttcttatatttctaatggttgaattataatgtgggtttatacattttttacccttttgtcaaagagaattaactttgtttccaggcttttgctactcttcactcagctacaataaacatcctgaatgttttcttaaaaaa

SEQ ID NO: 450 - protein, 231 aa, Human
MQDEERYMTLNVQSKKRSSAQTSQLTFKDYSVTLHWYKILLGISGTVNGILTLTLISLILLVSQGVLLKCQKGSCSNATQYEDTGDLKVNNGTRRNISNKDLCASRSADQTVLCQSEWLKYQGKCYWFSNEMKSWSDSYVYCLERKSHLLIIHDQLEMAFIQKNLRQLNYVWIGLNFTSLKMTWTWVDGSPIDSKIFFIKGPAKENSCAAIKESKIFSETCSSVFKWICQY

SEQ ID NO: 451 - DNA, 2037 bp, Human
gttcggtgggctccaggcgtcgcgatggaggagagcgggtacgagtcggtgctctgtgtcaagcctgacgtccacgtctaccgcatccctccgcgggctaccaaccgtggctacagggctgcggagtggcagctggaccagccatcatggagtggccggctgaggatcactgcaaagggacagatggcctacatcaagctggaggacaggacgtcaggggagctctttgctcaggccccggtggatcagtttcctggcacagctgtggagagtgtgacggattccagcaggtacttcgtgatccgcatcgaagatggaaatgggcgacgggcgtttattggaattggcttcggggaccgaggtgatgcctttgacttcaatgttgcattgcaggaccatttcaagtgggtgaaacagcagtgtgaatttgcaaaacaagcccagaacccagaccaaggccctaaactggacctgggcttcaaggagggccagaccatcaagctcaacatcgcaaacatgaagaagaaggaaggagcagctgggaatccccgagtccggcctgccagcacaggagggctgagcctgcttccccctcccccaggggggaaaacctccaccctgatccctccccctggggagcagttggctgtggggggatccctcgtccagccagcagttgctcccagttcaggaggtgctcctgtaccctggccacagcccaatcctgccactgctgacatctggggagactttaccaaatctacaggatcaacttccagccagacccagccaggcacaggctgggtccagttctgacctgagcacggtttttcctcatgtgacttctgggaaggcgctccctcatctgggccaaaggaaggaggacgaagccctcctcagctggcctgtgtttggggcatgaatctctcctctcctccttgtctggctctgttgacaaaccgggcatgtttggcagtaaattggcaccgtgtcacactgtttcctgggattcaagtatgcaaccagaacacaggagaagaaaagctccaggatccctgtccccatctgtcctcttgatgtgagagagactctgagacttcttccatcgcaatgacctgtattaaacacaagccccccaagcaaaagaagaggttgagtttgctgccaggattcagatcagcccttcccagggtctgcaggtgtcacatgatcacagttcagcgggaggctttccgtacccacactggctgtagccacttcagtccatctgccctccagaggaggggtttcttcctgatttttagcaggtttagaggctgcagcttgagctacaatcaggagggaaattggaaggattagcagcttttaaaaatgtttaaatattttgctttgctaatgtgctgatccgcactaactcatctttgcaaaaggaactgctccctcggcgtgccccagctggggcctctgaagggattcctcactgtgggcagctgccctgagcttcaggcagcagtgttcatctctggccagttgtctggtttccatgtattctaggccaggtaggcaacacagagccaaggcgggtgctggaagccagacggaacagtgttggggcaggaaggtggatgctgttgtcatggagctgtgggagttggcactctgtctgctggtggccctctcggctcacatgttcacagtgcagctcctggcagacttgggttttctctttggtggtttctaaagtgccttatctgcaaacaacttcttttctccttcaggaactgtgaatggctagaagaaggagctcagtaaactagaagtccagggttgcttggtttactggtttataagaaatctgaaagcacctctgacattccttttattaactcacctctcagttgaaagatttcttctttgaaaggtcaagaccgtgaactgaaaaaagtgttggcctttttgcgggaccagatttttaagataaaataaatatttttacttctgtcaaaaaaaaaaaaaaaaaaaaaaaaaaaaaaaaaa

SEQ ID NO: 452 - DNA, 1552 bp, Human
acttaatgggctcaaggtcacctacctgacctaccagcagctcaatggccttcccaaagaagaaacttcagggtcttgtggctgcaaccatcacgccaatgactgagaatggagaaatcaacttttcagtaattggtcagtatgtggattatcttgtgaaagaacagggagtgaagaacatttttgtgaatggcacaacaggagaaggcctgtccctgagcgtctcagagcgtcgccaggttgcagaggagtgggtgacaaaagggaaggacaagctggatcaggtgataattcacgtaggagcactgagcttgaaggagtcacaggaactggcccaacatgcagcagaaataggagctgatggcatcgctgtcattgcaccgttcttcctcaagccatggaccaaagatatcctgattaatttcctaaaggaagtggctgctgccgcccctgccctgccattttattactatcacattcctgccttgacaggggtaaagattcgtgctgaggagttgttggatgggattctggataagatccccaccttccaagggctgaaattcagtgatacagatctcttagacttcgggcaatgtgttgatcagaatcgccagcaacagtttgctttcctttttggggtggatgagcaactgttgagtgctctggtgatgggagcaactggagcagtgggcagtacctataactacctgggaaaaaagacaaaccagatgttggaggcttttgaacaaaaggacttctctttagccctgaactatcagttttgtatccagagatttatcaactttgttgtcaaactaggttttggagtgtcacagaccaaagccatcatgactctggtctctgggattccaatgggcccaccccggcttccactgcagaaagcctccagggagtttactgatagtgctgaagctaaactgaagagcctggatttcctttctttcactgatttaaaggatggaaacttggaagctggtagctagtgcctctctatcaaatcagggtttgcaccttgagacataatctaccttaaatagtgcatttttttctcagggaattttagatgaacttgaataaactctcctagcaaatgaaatctcacaataagcattgaggtaccttttgtgagccttaaaaagtcttattttgtgaaggggcaaaaactctaggagtcacaactctcagtcattcatttcacagatttttttgtggagaaatttctgtttatatggatgaaatggaatcaagaggaaaattgtaattgattaattccatctgtctttaggagctctcattatctcggtctctggttcctaatcctattttaaagttgtctaattttaaaccactataatatgtcttcattttaataaatattcatttggaatctaggaaaactctgagctactgcatttaggcaggcactttaataccaaactgtaacatgtctcaactgtatacaactcaaaatacaccagctcatttggctgctcagtctaactctagaatggatgcttttgaattcatt

SEQ ID NO: 453 - protein, 320 aa, Human
MAFPKKKLQGLVAATITPMTENGEINFSVIGQYVDYLVKEQGVKNIFVNGTTGEGLSLSVSERRQVAEEWVTKGKDKLDQVIIHVGALSLKESQELAQHAAEIGADGIAVIAPFFLKPWTKDILINFLKEVAAAAPALPFYYYHIPALTGVKIRAEELLDGILDKIPTFQGLKFSDTDLLDFGQCVDQNRQQQFAFLFGVDEQLLSALVMGATGAVGSTYNYLGKKTNQMLEAFEQKDFSLALNYQFCIQRFINFVVKLGFGVSQTKAIMTLVSGIPMGPPRLPLQKASREFTDSAEAKLKSLDFLSFTDLKDGNLEAGS

SEQ ID NO: 454 - DNA, 993 bp, Human
atgctgccggactggaagagctccttgatcctcatggcttacatcatcatcttcctcactggcctccctgccaacctcctggccctgcgggcctttgtggggcggatccgccagccccagcctgcacctgtgcacatcctcctgctgagcctgacgctggccgacctcctcctgctgctgctgctgcccttcaagatcatcgaggctgcgtcgaacttccgctggtacctgcccaaggtcgtctgcgccctcacgagttttggcttctacagcagcatctactgcagcacgtggctcctggcgggcatcagcatcgagcgctacctgggagtggctttccccgtgcagtacaagctctcccgccggcctctgtatggagtgattgcagctctggtggcctgggttatgtcctttggtcactgcaccatcgtgatcatcgttcaatacttgaacacgactgagcaggtcagaagtggcaatgaaattacctgctacgagaacttcaccgataaccagttggacgtggtgctgcccgtgcggctggagctgtgcctggtgctcttcttcatccccatggcagtcaccatcttctgctactggcgttttgtgtggatcatgctctcccagccccttgtgggggcccagaggcggcgccgagccgtggggctggctgtggtgacgctgctcaatttcctggtgtgcttcggaccttacaacgtgtcccacctggtggggtatcaccagagaaaaagcccctggtggcggtcaatagccgtggtgttcagttcactcaacgccagtctggaccccctgctcttctatttctcttcttcagtggtgcgcagggcatttgggagagggctgcaggtgctgcggaatcagggctcctccctgttgggacgcagaggcaaagacacagcagaggggacaaatgaggacaggggtgtgggtcaaggagaagggatgccaagttcggacttcactacagagtag

SEQ ID NO: 455 - protein, 330 aa, Human
MLPDWKSSLILMAYIIIFLTGLPANLLALRAFVGRIRQPQPAPVHILLLSLTLADLLLLLLLPFKIIEAASNFRWYLPKVVCALTSFGFYSSIYCSTWLLAGISIERYLGVAFPVQYKLSRRPLYGVIAALVAWVMSFGHCTIVIIVQYLNTTEQVRSGNEITCYENFTDNQLDVVLPVRLELCLVLFFIPMAVTIFCYWRFVWIMLSQPLVGAQRRRRAVGLAVVTLLNFLVCFGPYNVSHLVGYHQRKSPWWRSIAVVFSSLNASLDPLLFYFSSSVVRRAFGRGLQVLRNQGSSLLGRRGKDTAEGTNEDRGVGQGEGMPSSDFTTE

SEQ ID NO: 456 - DNA, 5163 bp, Human
ttaggggcagaaaaacatttgtaataattaatggctttgagagacacaaggctttgtttgccccagagtattagttaacccacctagtgctcctaatcatacaatattaaggattgggagggacattcattgcctcactctctatttgtttcaccttctgtaaaattggtagaataatagtacccacttcatagcattgtatgatgattaaattggttaatatttttaaaatgcttagaacacagattgggcacataacagcaagcaccacatgtgtttataagataaattcctttgtgttgccttccgttaaagtttaaataagtaaataaataaataaatacttgcatgacattttgaagtctctctataacatctgagtaagtggcggctgcgacaatgctactggagttccagaatcgtgttggtgacaagattgttcaccagcatatggtgtggtgaaaactcactaatttggaattagttcagattattaagcctgaataggtgaaaatcctgaaatcaaggatctttggaactatttgaaatcagtattttatattttcctgttgtattcattaaagtgttgcaagtgttctatttgatggattaagtatatttaggatatacatgttcaatttgtgattttgtatacttaattggaacaagaaagctaataaaggttttgatatggacatctattcttttaagtaaacttcaatgaaaatatatgagtagagcatatagagatgtaaataatttgtggacacaccacagactgaaatagcaaatttaaaagaaattgttggaagaatcaagtgtttgtggaatgagtcctcctagtaaagttcctgctcttgtgaataattaagcctcatgtataattactatagcaaaaggaagcctaagaagtattagactctacttgtatttaaattacattttacataatttatgtgtatgaaaaatgttttaaatgcttattttcgtaagccatgagatagctcctttatattttaagaatttctgaattaatttgcttggattttattagtgcaaatggcagagctagcaattcctttttctgtgttcccattccatcctattcatccctcttttaggaaactctgaactctggattgtccttgtttacatacctgcctcctgcattggactatgtgtctctgagtgtagtatgactaattcatttgtttgtcaaggactctcaatgcatttgttgaacagcctaattagtaatgtctgcaacaatgacattttactgtatttaataaagctctgggaaagtaggatacacataagacaggtctaggtctaaattctttacagaaacttggatttttagttcggtttgaaatttgaagatgtgagtatatttatctcagtttcccaaaggacaagctaattggaattatcatcctctttcacttgattggatccccagaatgccatttacgcatgcagcaggattttataacagttttaaattctgtatatttgatgaagaggttttatatttttggattcaagcctctttttaaacttctacaatatggtttacaataattccttatatcctgcttttgaaatacatattacaactttttaagtttggaaggctatatttcaaggactgaagttacagtatactcaagtgatacacaagcctagcaccccactttccacatagtgttcgataaagattgataaactcgaaatcacagaccttttaattcttaagacaaatagcagcagaaagaaacatctttggcttatttctggtaaggtttttatgctctgtaaaacaaagaattgtattcatccgcgcagcacagattctattaaaaataaatgtgagagtcgttaatgtagtactgctcatttaccatcaaaattcacttttcaggaataatcccatcagtttaaattggatattggaatgagcattgattacatttaacttggtagcccaaaatttcttcatggggttttgaactcggcgggatttcaaaggttttaaaaatgagtttttgattttttttaaaaccctcaaatttcattacctttaaactaggtcgaaacggggcgcaagagattggattaacaccatagtaatacttattttgttcttaaccatttcagggcttcttgaaatagaggctgtatggtgtaatggaaaaaacagccttggaatctgggagcctgattcctggattcagtcccagttttgcgtgaccttgggcaagttactttacttctctgaatttccgtttcctcctctgcaaaatgaggatcgcaatagccaccttgcaaccttgactggagcgagcctcgcacaccccgcgccggcctggaggaagagcagccatgattacgccgccttcgctccgctacccgcttgcggctggcgccctcctccagcaggtgtaggcgctgccgcgctgccccacgcctttccgccgctcgcgggcctgcgcctcggcgtccccgaggaggccgctgcgggctgaggtagcgcaccggcctctcggcgtcccagtccggtcccgggcggagggaaagcgggcgacccacctccgaggcagaagccgaggcccggccccgccgagtgcggaggagcgcaggcagcccccgcccctcggccctccccccggccctcccggccctccctccgccccctccgccctcgcgcgccgcccgcccgggtcgccgcggggccgtggtgtacgtgcagagcgcgcagagcgagtggcgcccgtatgccctgcgctcctccacagcctgggccgggccgcccgggacgctgaggcggcggcggcggccgagggggccggtcttgcgctccccaggcccgcgcgcctgagcccaggttgccattcgccgcacaggccctattctctcagccctcggcggcgatgaggcgctgaggcggctgccggcgctgcgccggagcttaggactcggaagcggccgggccgagggcgtggggtgccggcctccctgaggcgagggtagcgggtgcatggcgcagtaacggcccctatctctctccccgctccccagcctcgggcgaggccgtccggccgctacccctcctgctcggccgccgcagtcgccgtcgccgccgccgccgccgccatggccaatgacagcggcgggcccggcgggccgagcccgagcgagcgagaccggcagtactgcgagctgtgcgggaagatggagaacctgctgcgctgcagccgctgccgcagctccttctactgctgcaaggagcaccagcgtcaggactggaagaagcacaagctcgtgtgccagggcagcgagggcgccctcggccacggagtgggcccacaccagcattccggccccgcgccgccggctgcagtgccgccgcccagggccggggcccgggagcccaggaaggcagcggcgcgccgggacaacgcctccggggacgcggccaagggaaaagtaaaggccaagcccccggccgacccagcggcggccgcgtcgccgtgtcgtgcggccgccggcggccagggctcggcggtggctgccgaagccgagcccggcaaggaggagccgccggcccgctcatcgctgttccaggagaaggcgaacctgtaccccccaagcaacacgcccggggatgcgctgagccccggcggcggcctgcggcccaacgggcagacgaagcccctgccggcgctgaagctggcgctcgagtacatcgtgccgtgcatgaacaagcacggcatctgtgtggtggacgacttcctcggcaaggagaccggacagcagatcggcgacgaggtgcgcgccctgcacgacaccgggaagttcacggacgggcagctggtcagccagaagagtgactcgtccaaggacatccgaggcgataagatcacctggatcgagggcaaggagcccggctgcgaaaccattgggctgctcatgagcagcatggacgacctgatacgccactgtaacgggaagctgggcagctacaaaatcaatggccggacgaaagccatggttgcttgttatccgggcaatggaacgggttatgtacgtcatgttgataatccaaatggagatggaagatgtgtgacatgtatatattatcttaataaagactgggatgccaaggtaagtggaggtatacttcgaatttttccagaaggcaaagcccagtttgctgacattgaacccaaatttgatagactgctgtttttctggtctgaccgtcgcaaccctcatgaagtacaaccagcatatgctacaaggtacgcaataactgtttggtattttgatgcagatgagagagcacgagctaaagtaaaatatctaacaggtgaaaaaggtgtgagggttgaactcaataaaccttcagattcggtcggtaaagacgtcttctagagcctttgatccagcaataccccacttcacctacaatattgttaactatttgttaacttgtgaatacgaataaatgggataaagaaaaatagacaaccagttcgcattttaataaggaaacagaaacaactttttgtgttgcatcaaacagaagattttgactgctgtgactttgtactgcatgatcaacttcaaatctgtgattgcttacaggaggaagataagctactaattgaaaatggtttttacatctggatatgaaataagtgccctgtgtagaatttttttcattcttatattttgccagatctgttatctagctgagttcatttcatctctcccttttttatatcaagtttgaatttgggataatttttctatattaggtacaatttatctaaactgaattgagaaaaaattacagtattattcctcaaaataacatcaatctatttttgtaaacctgttcatactattaaattttgccctaaaagacctcttaataatgattgttgccagtgactgatgattaattttattttacttaaaataagaaaaggagcactttaattacaactgaaaaatcagattgttttgcagtccttccttacactaatttgaactcttaaagattgctgctttttttttgacattgtcaataacgaaacctaattgtaaaacagtcaccatttactaccaataacttttagttaatgttttacaagg

SEQ ID NO: 457 - protein, 426 aa, Human
MANDSGGPGGPSPSERDRQYCELCGKMENLLRCSRCRSSFYCCKEHQRQDWKKHKLVCQGSEGALGHGVGPHQHSGPAPPAAVPPPRAGAREPRKAAARRDNASGDAAKGKVKAKPPADPAAAASPCRAAAGGQGSAVAAEAEPGKEEPPARSSLFQEKANLYPPSNTPGDALSPGGGLRPNGQTKPLPALKLALEYIVPCMNKHGICVVDDFLGKETGQQIGDEVRALHDTGKFTDGQLVSQKSDSSKDIRGDKITWIEGKEPGCETIGLLMSSMDDLIRHCNGKLGSYKINGRTKAMVACYPGNGTGYVRHVDNPNGDGRCVTCIYYLNKDWDAKVSGGILRIFPEGKAQFADIEPKFDRLLFFWSDRRNPHEVQPAYATRYAITVWYFDADERARAKVKYLTGEKGVRVELNKPSDSVGKDVF

SEQ ID NO: 458 - DNA, 2309 bp, Human
ggggcggacaccagacggagcctccggagttcctccgcccccacctcgccgggtcctggagccgcagtcctcccagctgccctcctcgtggccatggagtgtccacacctgagctccagcgtctgcattgctccggactcagccaagttccccaacggctccccgtcgtcctggtgctgcagcgtgtgccggtccaacaaaagcccttgggtctgtttgacttgttcaagtgtccactgtggaaggtatgtgaatggccatgcaaaaaaacattatgaagatgcacaagtacctttaaccaaccataagaaatcagaaaagcaagataaagttcagcacacagtatgtatggattgcagtagctacagtacatactgttatcgctgtgatgattttgtggttaatgacaccaagctgggactggtacagaaagtcagagaacacttacagaacttggaaaactcagctttcacagctgacaggcataagaaaagaaaacttttggaaaactcaacactaaacagcaagttattaaaagtaaatggaagcaccactgccatttgtgccacaggccttcggaatttggggaacacatgtttcatgaatgccatccttcagtcactcagtaacattgagcagttttgctgttatttcaaagaactgcccgccgtggagttaaggaatgggaaaacagcaggaaggcggacataccacaccaggagccaaggggataacaatgtgtctttggtagaagagtttagaaagacactctgtgctttatggcaaggcagccagactgcatttagcccagagtccttattttatgttgtttggaagattatgccaaactttaggggctatcaacagcaggacgcccatgaattcaatgcgctaccttttggaccacctacacttgggaacttcagggcggtttcaacggtgtttcccgctcagcaattctgcaggagaattctactctgtctgcaagtaaacaagtgttgcataaatggagcatctactgttgtcacggctatattcggaggcattctccaaaatgaggttaactgcctcatatgtgggacagaatctagaaagtttgatccattcctagacctttcattagatattccaagtcagttcagaagtaagcgctctaagaatcaagaaaatggaccagtttgttcgttacgagattgtcttcgcagttttaccgacttagaagaacttgatgagacagagttatatatgtgccataaatgcaaaaagaaacaaaagtccacaaaaaagttttggattcaaaaactacccaaggtgctatgcttacatttgaaaagatttcattggacagcatatttaagaaataaagttgatacatacgtagaatttccactgagaggcctagacatgaaatggtacttactagagcctgagaacagtggcccggagagctgcctgtatgacctcgccgctgtggtggtgcaccatggttccggggttggttctggacattacacagcatacgcaactcacgaaggccgctggttccacttcaatgacagtactgtaacactgactgacgaggagactgtggtgaaggcgaaggcctacatccttttctacgtggaacaccaggccaaagctggatcggataaactttaatacctcctccaaatcatcattcaccaaccataccagagaaacatttccagttttccacaaatacttgatacaagatttaatttcattatgcacttttcaatttcctattttggatttagttttgtcaatggtagtgacttactgaacatggggcaccaactaattttgttgttgttctaccagaaaacctcagcagatgttttgatttgctgctttagttgtaataattcaatttttataggtagttgtaagaacttagtcttatttgacttttttattttatgttaatgttttcagttctcactttgaggcacatttacatcaatgcttttgttcctctcacatgctgaaagcaagatgtgttccttattgtgaagagcgacacaactgcctgctgcctttccacagctataatggacatcaggttgactctaaatcaaggatcatgtgtgcacaatacttgtggcccacaaaatttcacaatgactgctgaggaatcattctttttgcctgtaaaatataacaaagggcatcattaagtagaccaggtaattactgcttgtctctcaaggctgctgtctttatcagcactaactaaataaatttgttggttcagttgtacttgtcctgcaaataaaaaaaaaaaaaaa

SEQ ID NO: 459 - protein, 521 aa, Human
MECPHLSSSVCIAPDSAKFPNGSPSSWCCSVCRSNKSPWVCLTCSSVHCGRYVNGHAKKHYEDAQVPLTNHKKSEKQDKVQHTVCMDCSSYSTYCYRCDDFVVNDTKLGLVQKVREHLQNLENSAFTADRHKKRKLLENSTLNSKLLKVNGSTTAICATGLRNLGNTCFMNAILQSLSNIEQFCCYFKELPAVELRNGKTAGRRTYHTRSQGDNNVSLVEEFRKTLCALWQGSQTAFSPESLFYVVWKIMPNFRGYQQQDAHEFNALPFGPPTLGNFRAVSTVFPAQQFCRRILLCLQVNKCCINGASTVVTAIFGGILQNEVNCLICGTESRKFDPFLDLSLDIPSQFRSKRSKNQENGPVCSLRDCLRSFTDLEELDETELYMCHKCKKKQKSTKKFWIQKLPKVLCLHLKRFHWTAYLRNKVDTYVEFPLRGLDMKWYLLEPENSGPESCLYDLAAVVVHHGSGVGSGHYTAYATHEGRWFHFNDSTVTLTDEETVVKAKAYILFYVEHQAKAGSDKL

SEQ ID NO: 460 - DNA, 5463 bp, Human
aatgaattagagaaacagatgaattgtaacttgaaggaactcaaggaatttatagacaatgagatgctacttatcttgggacagatggacaagccctcccttatcttcgatcatctttatctcggttgattacattttaaatgttaccagagaaatcgataatttttttcctggcttatttgcatatcataacatccgagtctacgatgaagagaccacagacctcctcgcccactggaatgaagcgtatcattttataaacaaagcgaagaggaaccattccaagtgcctggtgcattgcaaaatgggcgtgagtcgctcggcctccacagtcatagcctatgcaatgaaggaattcggctggcctctggaaaaagcatataactatgtaaagcagaagcgcagcatcacgcgccccaacgcgggctttatgaggcagctgtctgagtatgaaggcatcttggatgcaagcaaacagcggcacaacaagctgtggcgtcagcagacagacagcagcctccagcagcctgtggatgaccctgcaggacctggcgacttcttgccagagaccccagatggcaccccggaaagccagctgcccttcttggatgatgccgcccagcccggcttagggccccccctcccctgctgtttccggcgactctcagacccccttctgccttcccctgaggatgaaactggcagcttggtccacctggaggatccggagagggaggctctgttggaggaagctgctccacctgcagaggtgcacaggccggccagacagccccagcaaggttccggactctgtgagaaggatgtgaagaagaaactagagtttgggagtcccaaaggtcggagcggctccttgctgcaggtggaggagacggaaagggaggagggcctgggagcagggaggtgggggcagcttccaacccagctcgatcaaaacctgctcaactcggagaacctaaacaacaacagcaagaggagctgtcccaacggcatggaggatgatgctatatttgggatccttaacaaagtgaagccttcctataaatcctgtgccgactgcatgtaccctacagccagcggggctcctgaggcctccagggagcgatgtgaggaccccaatgctcccgccatctgcacccagccagccttcctaccccacatcacgtcctcccctgtggcccacttggccagcaggtcccgtgttccggagaagccagcctctggcccaaccgaacctcccccgttcctaccaccagcaggctccaggagggcagacaccagtggccctggggctggagctgccctagagccaccagccagccttttggaaccttccagagagaccccaaaagtcctgccaaagtccctccttttgaagaattctcactgtgataagaaccctcccagcacagaagtggtaataaaggaagaatcgtcacccaagaaagatatgaagccagccaaggacctgaggcttctgttcagtaatgaatctgagaagccgacaaccaacagctacctgatgcagcaccaggagtccatcattcagctgcagaaggcaggcttggtccgcaagcacaccaaagagctagagcggctgaagagcgtgcctgcagacccagcacctccctccagggatggccctgccagcaggctggaggccagcatccccgaggagagccaggatccagccgcgctccacgagctgggccccctggttatgcccagccaggccgggagtgatgagaagtcagaggccgcccccgcttcattggaaggaggctcactgaagagcccccctcctttcttctaccgcctggaccacaccagtagtttctcaaaagactttctgaagaccatctgctacacccccacctcctcttccatgagctccaacctgacccggagctccagcagcgatagcatccacagtgtccgtgggaagcccgggctggtgaagcagcggacacaggagattgagacccggctccggctggcgggcctcaccgtctcttccccactgaagcgctcacactctcttgccaagctggggagtctcaccttctcaacggaagacctgtccagtgaggctgacccgtccaccgtcgctgactcccaggacaccactttgagtgaatcttccttcttgcatgagccccagggaaccccgagggacccagctgcaacctccaaaccatcagggaaacccgccccagaaaacttaaagagcccttcgtggatgagcaaaagctgacccgccttttgctgcgtcaggctgggcggatattttcatatgatccctccctcactttcactgtggatttggatcgaccccttacatcttgatttcccttaaacgagtgaagtcatcctaacttttcccctactcttgccatagagaggaggagaagaaactaaccaacatgcagcacaagaaggggagctgtcagtcgtgtggcctgggagaaccaggagccgccggccaggagacacaaaactccgctcccaccgtgtcttcaagaagaaccatgttttaggaagaacgtgcacacataggcgcacacatccagactgttcccttcgcatcctgcagaagagtcctggtggtggcagcctcaccgcggcacacgttctagctcattcttggcctcgcagaaaactctcggatggcaacattaagtcctacctctgttctcgctgcgctttttatttttaaaacacacgaatgaccaaggcttgttccagggaataatgctctgtctgaaagcgtttttccaaaaaaagaatttttcgttttgtgttttggttgggaccccagacgtgtcaagacttttaacccgacagccccaagcactgctgagtaaagtcatcagatgagtagtcccacgctgttgttgagctgactctgtgcccgaatggtggtgcaggcgccctgtcctggttgtgttgttacgtgtttgaccagcacaggggtccggtggggaaaatgtatgggttgttctcagttgttgctaatgctgaagtttaaatctcaaggggaagggcccacctgcattgttgagtgtctgctgctgaaacacatgattgtgtttaggtttgaaattgctcaagtgtctggctcaggtggtggttctgagacacatcgtcctgctgagagcccagatgcttaggtccactagggcccatctagggaagggaaaggagatttcagcggcttccccgaaaggaacgggactgtcgggatgcttcccggatgtctacagttgccccttcctgcagtgagattactgcttcctgtttccctccagctcttcccagcagcagtgagggagtataagagggatctgtagtcgctgcctggctctgtgggcggcccctttaagactcaggtgagctcagccagtcccgctgcgccaggcttgaatcaaaggtgtcagcaagctagatgtcaaaacatttcgagagagaggcagcttgcagaaaagcagaaaggttgaattcaggggtcagcaaactatggcatgtggccccgtgagctaggaatggtttttcctctttaagacagggcctggctctgtcacctaggctggagtgcagtggtgcaatcatgactcactgcagcatcaacctccctggctcaagcgatggcttttacctttttaaggagttgtaaaaaaaagaaataatatgtgacagaattcatgtggcccacaaagcctgaggtacttactgtcaggccctttgtagaaaaagttgctgacccctggtttgatttgccacacagggctgctcatggccctgtaggaagaaactgggtaaatgtgaagccctctgcctctctgacacctaaggccagacccttccctcctcccgaccacaagctttgccagccccgcactagcctcacctgtgcaggatggagtaggttgcgtacatgggggaaggcaggtgaacacagttggctgaagctcttccacaattccatcttgccctcagctgggtccgccagattaactcagtgaaaccagaaagccttcaaggaccagctgaattctgaaagtgagtgagtgagccatcatcttaacattggccagaactgtgttccccaaagctattctagaaagcaccccaggagggatctgcaggaacaaggctagttcatattttacctagtgagcacagtttttgcaaaaatcctccctccaggactttgtctccttggagtgatttttaaaaatacatacattactttatagggagctgttttcccactagtgtcaattaaaatcaccttaaaaggtgattatccacttattcctaaacccctgtgggttgttccccctttccctcagccaacaaaagcatagcctcaaaaaatatcaagttcggtatgttttgccaaatcaaatttcatgtggtagatcaatttttgtgtcaaaataatcttttaaatttagtgatgacaggcttttgttggttttttaaccacgtctatgtatgagaatgatatatttttgaaaactttaattttgaaagccataatttttcttatctaaagagttggggggtggggtgtggaatctggagagtacaagttggtctttggcttctggcaaacttacccattcatttttggaagcacagctagcatatcaacatccagacgagagcgctggtcccgtccacagagcagagtgaagcattctggacttgatgcttaatagcctggcctggagaaaagggtaaggtttatttttggaaacccagatcagttgcatgtaaacagatggcacatggctatttaaaatgctgtatgatggggccgggcgcggtggctcacgcctgtaatcctagcactttgggaggccgaggcaggcggatcatctgaggtcaggagttctagaccagcctggccaacatggtgaaaccccgtctctactaaaaatacaaaaacttagctgggtgtggtagtgcgtgcctgtaatcctagctacttaggaggctgaggcaggagaatcgcttgaacctgggtggcggaggttgcaatgagccgagatcgcgccactgcactccagcctgggtgcaatgaaactgggagtgaaactccgtctcaaaaaaataaaatgctgtatgaacaagatgagcattctgtcaggtgtcgggacacctgggcaaagacgaattcatgctgtctgtgaaaaggaagtttgcactgtaacatatgccatagcttggcccttgctttgtatgcaaccttagctgatggggaaaattccaaacataagtggcacaggaaagaggcaggcagaggaggcaggggtctgtgctgtgcaagtcactggttttttatgactatcattttcattgaatgcatttgttgaattgggacaaaaggaacattttctaaatcagcttgatactctttataaaaaacagctgaatctt

SEQ ID NO: 461 - DNA, 1810 bp, Human
gaaggccctgccgggcggcggcggcggcgacagcgtgcgagccatggtcgcgctggagaaccccgagtgcggcccggaggcggcggagggcaccccgggcgggcggcggctgctgccccttcccagctgcctgcctgccctagccagctcccaggtgaagagactctcggcttccaggcggaaacagcacttcatcaaccaggcagtgcggaactcagacctcgtgcccaaggccaaggggcggaagagcctccagcgcctggagaacacccagtacctcctgaccctgctggagacagacgggggcctgcctggcctggaggatggggacttggcaccccctgcatcaccaggcatctttgccgaggcctgcaacaacgccacctatgtggaggtctggaacgatttcatgaaccgctccggggaggagcaggagcgggttcttcgctacctggaggatgagggcaggagcaaggcgcggaggaggggccctggccgtggggaggaccggaggagagaggaccccgcctatacaccccgcgagtgcttccagcgcatcagccggcgtctgcgagccgtcctcaagcgcagccgcatccccatggaaacgctggagacctgggaggagcggctgcttcggttcttctccgtgtccccccaggccgtgtacacagcaatgctagacaacagcttcgagaggcttctgctgcacgctgtctgccagtacatggacctcatctcggccagtgctgacctggaggggaagcggcagatgaaggtcagtaatcggcacctggatttcctgccgccggggctgctcctgtccgcctacctggagcagcacagctgatggcggccccgcggagaccccgctgccacctcgcccagccatcaagccctccgataccttcggctaaaatatctttcatatttttagaatttgtcctcggaaacctttttcgcttggggtggtctctctcactctgccccctcctcacgcagctcttggcagtcaacagacgctggcggctggggctgcccatgccatcccagctccaagcttcccactccgggacttgtgtttgggtggggagacctgacctgggcatgttcctgtttcttcatcgttgagcttttctggcccggtctgaagctcaagtgaggagggggaggctgggtttttatcacttttaatgaatttggtgtgatttgttgtagatttttaaatttcccttttggagagaaaaaccaaaaaaactcgccccactggtaaaacatgggtcttggtcccagcccctgctcagcccctcccagtttttagcttgaatgagggtggggtctctgggaccctgcccctcatgccagaagcatcttgtgttgtatatgtgtgcgcgcgtgtgccctgagacccaggacagaagccacggtcctaagagccggttttatcctcgtcattctgcgtgtcctcccccacgccacctgtgtcggggctcagggtctcctgctttatatgagcccccttcctttcctcccctcctttatgctgggggtccaggacttccagccagaagcctctgcccttgcactaccttgtctgtcaccccatcccgtgtcccctcgtcccccagcctgactcctgcctgatagctcctgtgtccccatgctggtcctcctggcccaggctgcaggagccaggctggggggcctccgcacccccttgctgcgtgtgggtaattgtgttttgggggaaagtggggaatttaataaatttctggtgctctggcaaaaaaaaaaaaaaaaaaaaaaaaaa

SEQ ID NO: 462 - DNA, 1097 bp, Human
ctctgtcctcattgcgcccagacgggccggcccagagctcccgggtcgtctttcgtgtggccgcgagacactcttgcactcctgtaatgagcctggcactgtgatgaaacacttttcccgtgtcgtttgagtgcatcttctcaacaaccctaggagggttcttgaagcttttgagattaacaatggcaggaaaatcatcactttttaaagtaattctccttggagatggtggagttgggaagagttcacttatgaacagatatgtaactaataagtttgatacccagctcttccatacaataggtgtggaatttttaaataaagatttggaagtggatggacattttgttaccatgcagatttgggacacggcaggtcaggagcgattccgaagcctgaggacaccattttacagaggttctgactgctgcctgcttacttttagtgtcgatgattcacaaagcttccagaacttaagtaactggaagaaagaattcatatattatgcagatgtgaaagagcctgagagctttccttttgtgattctgggtaacaagattgacataagcgaacggcaggtgtctacagaagaagcccaagcttggtgcagggacaacggcgactatccttattttgaaacaagtgcaaaagatgccacaaatgtggcagcagcctttgaggaagcggttcgaagagttcttgctaccgaggataggtcagatcatttgattcagacagacacagtcaatcttcaccgaaagcccaagcctagctcatcttgctgttgattgttagattgttgatgcattctaaccaactcacacatatacacaaaatcaacatggggatggagaagagaattagcgtttgcagcagtgtatcatctactaataaaattaaactaatgttgctgcttcattagttggtgggagaagggacacatccactcttggaggaatatatttactcaataatggcaccttacatttataaattgtaacagttgtctaataacgtttctttaatttaaatatgtaagttgcagagctaataaatgaaatgaccaagactttaattataaaaaaaaaaaaaaaaaa

SEQ ID NO: 463 - protein, 201 aa, Human
MAGKSSLFKVILLGDGGVGKSSLMNRYVTNKFDTQLFHTIGVEFLNKDLEVDGHFVTMQIWDTAGQERFRSLRTPFYRGSDCCLLTFSVDDSQSFQNLSNWKKEFIYYADVKEPESFPFVILGNKIDISERQVSTEEAQAWCRDNGDYPYFETSAKDATNVAAAFEEAVRRVLATEDRSDHLIQTDTVNLHRKPKPSSSCC

SEQ ID NO: 464 - DNA, 6737 bp, Human
  unsure 5984: unknown base
  unsure 5985: unknown base
  unsure 5986: unknown base
  unsure 5987: unknown base
  unsure 5988: unknown base
  unsure 5989: unknown base
  unsure 5990: unknown base
  unsure 5991: unknown base
  unsure 5992: unknown base
  unsure 5993: unknown base
  unsure 5994: unknown base
  unsure 5995: unknown base
  unsure 5996: unknown base
  unsure 5997: unknown base
  unsure 5998: unknown base
  unsure 5999: unknown base
  unsure 6000: unknown base
  unsure 6001: unknown base
  unsure 6002: unknown base
  unsure 6003: unknown base
  unsure 6004: unknown base
  unsure 6005: unknown base
  unsure 6006: unknown base
  unsure 6007: unknown base
  unsure 6008: unknown base
  unsure 6009: unknown base
  unsure 6010: unknown base
  unsure 6011: unknown base
  unsure 6012: unknown base
  unsure 6013: unknown base
  unsure 6014: unknown base
  unsure 6015: unknown base
  unsure 6016: unknown base
  unsure 6017: unknown base
  unsure 6018: unknown base
  unsure 6019: unknown base
  unsure 6020: unknown base
  unsure 6021: unknown base
  unsure 6022: unknown base
  unsure 6023: unknown base
  unsure 6024: unknown base
  unsure 6025: unknown base
  unsure 6026: unknown base
  unsure 6027: unknown base
  unsure 6028: unknown base
  unsure 6029: unknown base
  unsure 6030: unknown base
  unsure 6031: unknown base
  unsure 6032: unknown base
  unsure 6033: unknown base
  unsure 6034: unknown base
  unsure 6035: unknown base
  unsure 6036: unknown base
  unsure 6037: unknown base
  unsure 6038: unknown base
  unsure 6039: unknown base
  unsure 6040: unknown base
  unsure 6041: unknown base
  unsure 6042: unknown base
  unsure 6043: unknown base
  unsure 6044: unknown base
  unsure 6045: unknown base
  unsure 6046: unknown base
  unsure 6047: unknown base
  unsure 6048: unknown base
  unsure 6049: unknown base
  unsure 6050: unknown base
  unsure 6051: unknown base
  unsure 6052: unknown base
  unsure 6053: unknown base
  unsure 6054: unknown base
  unsure 6055: unknown base
  unsure 6056: unknown base
  unsure 6057: unknown base
  unsure 6058: unknown base
  unsure 6059: unknown base
  unsure 6060: unknown base
  unsure 6061: unknown base
  unsure 6062: unknown base
  unsure 6063: unknown base
  unsure 6064: unknown base
  unsure 6065: unknown base
  unsure 6066: unknown base
  unsure 6067: unknown base
  unsure 6068: unknown base
  unsure 6069: unknown base
  unsure 6070: unknown base
  unsure 6071: unknown base
  unsure 6072: unknown base
  unsure 6073: unknown base
  unsure 6074: unknown base
  unsure 6075: unknown base
  unsure 6076: unknown base
  unsure 6077: unknown base
  unsure 6078: unknown base
  unsure 6079: unknown base
  unsure 6080: unknown base
  unsure 6081: unknown base
  unsure 6082: unknown base
  unsure 6083: unknown base
  unsure 6084: unknown base
  unsure 6085: unknown base
  unsure 6086: unknown base
  unsure 6087: unknown base
  unsure 6088: unknown base
  unsure 6089: unknown base
  unsure 6090: unknown base
  unsure 6091: unknown base
  unsure 6092: unknown base
  unsure 6093: unknown base
  unsure 6094: unknown base
  unsure 6095: unknown base
  unsure 6096: unknown base
  unsure 6097: unknown base
  unsure 6098: unknown base
  unsure 6099: unknown base
  unsure 6100: unknown base
  unsure 6101: unknown base
  unsure 6102: unknown base
  unsure 6103: unknown base
  unsure 6104: unknown base
  unsure 6105: unknown base
  unsure 6106: unknown base
  unsure 6107: unknown base
  unsure 6108: unknown base
  unsure 6109: unknown base
  unsure 6110: unknown base
  unsure 6111: unknown base
  unsure 6112: unknown base
  unsure 6113: unknown base
  unsure 6114: unknown base
  unsure 6115: unknown base
  unsure 6116: unknown base
  unsure 6117: unknown base
  unsure 6118: unknown base
  unsure 6119: unknown base
  unsure 6120: unknown base
  unsure 6121: unknown base
  unsure 6122: unknown base
  unsure 6123: unknown base
  unsure 6124: unknown base
  unsure 6125: unknown base
  unsure 6126: unknown base
  unsure 6127: unknown base
  unsure 6128: unknown base
  unsure 6129: unknown base
  unsure 6130: unknown base
  unsure 6131: unknown base
  unsure 6132: unknown base
  unsure 6133: unknown base
  unsure 6134: unknown base
  unsure 6135: unknown base
  unsure 6136: unknown base
  unsure 6137: unknown base
  unsure 6138: unknown base
  unsure 6139: unknown base
  unsure 6140: unknown base
  unsure 6141: unknown base
  unsure 6142: unknown base
  unsure 6143: unknown base
  unsure 6144: unknown base
  unsure 6145: unknown base
  unsure 6146: unknown base
  unsure 6147: unknown base
  unsure 6148: unknown base
  unsure 6149: unknown base
  unsure 6150: unknown base
  unsure 6151: unknown base
  unsure 6152: unknown base
  unsure 6153: unknown base
  unsure 6154: unknown base
  unsure 6155: unknown base
  unsure 6156: unknown base
  unsure 6157: unknown base
  unsure 6158: unknown base
  unsure 6159: unknown base
  unsure 6160: unknown base
  unsure 6161: unknown base
  unsure 6162: unknown base
  unsure 6163: unknown base
  unsure 6164: unknown base
  unsure 6165: unknown base
  unsure 6166: unknown base
  unsure 6167: unknown base
  unsure 6168: unknown base
  unsure 6169: unknown base
  unsure 6170: unknown base
  unsure 6171: unknown base
  unsure 6172: unknown base
  unsure 6173: unknown base
  unsure 6174: unknown base
  unsure 6175: unknown base
  unsure 6176: unknown base
  unsure 6177: unknown base
  unsure 6178: unknown base
  unsure 6179: unknown base
  unsure 6180: unknown base
  unsure 6181: unknown base
  unsure 6182: unknown base
  unsure 6183: unknown base
ctgacagctgctgataaggtggcggcggcgaaggcagcggcaggtcgggagcaagatggcgctgcggccaggagctggttctggtggcggcggggccgcgggagctggcgcggggtccgccgggggaggcggcttcatgtttcctgttgcaggtgggataagaccccctcaaggaggcctgatgccgatgcagcaacaaggatttcctatggtctctgtcatgcagcctaatatgcaaggcattatgggaatgaattacagctctcagatgtcccaaggacctattgctatgcaggcaggaataccaatgggaccaatgccagcagcgggaatgccttacctaggacaagcacccttcctgggcatgcgtcctccaggcccacagtacactccagacatgcagaagcagtttgccgaagagcagcagaaacgatttgaacagcagcaaaaactcttagaagaagaaagaaaaagacgccagtttgaagagcagaagcaaaagctcagacttttgagcagtgtgaaacccaagacaggacgacgacagagtaggagatgatgctttggaagccataaaaggaaatttagatgggttttccagagatgcaaaaatgcaccctactccagcatcgcaccccaagaaaccagattgccccacatcatctcattctactaaaactgtctccccatcacctgcctttcttgatgaagaagaattcagtgactttatgcaggggcctgttgaagttcccccatgtgggccttcttccacgtcccagccctttcagtctttccacccctccaccccacttggccagttgcatacacagaaggctgggacacagcctctccctccaagtcagagtccagtgccttttgccttacatggcgtccctgggcaaattccttacttctctactgcttcagcctcacacagtgtaccagaagcaggcccttccttggaggagaagttcctagtatcttgtgatataagtacatctgggcaggaacaaattaaattaaatacttctgaagttggccacaaagccctaggcccaggttccagtaagaagtatcccagtttaatggccagtaacggggttgctgtagatggatgtgtaagtggtaccaccactgcagaggcagaaaatacttcagatcaaaacctgtcaattgaagagagtggtgtgggagtatttccctcacaggatcctgctcagcccagaatgcctccttggatttacaatgagagtttggttccagatgcctataagaaaatcttagaaaccacaatgactccaactggaatagatactgccaaactgtatcccattctgatgtcatctgggcttcccagggaaactcttggacagatatgggccttagctaatcgaactacacctggcaaacttacaaaagaagaactttataccgttctagccatgatagcggtaacacagaggggcgttcctgcaatgagtcctgatgctttaaaccagttcccagcagctcctattccaactttaagtggcttttctatgactctgcctacaccggtgagtcagccaactgtgataccttcaggtcctgcgggctccatgcccctcagccttggacagccagtcatgggcattaaccttgttggaccagtgggtggagctgcagcccaggcttctagtggtttcataccaacctaccctgcaaatcaggtagtaaagccagaagaagatgacttccaggattttcaagatgcttctaagtcaggatcccttgatgactcattcagtgatttccaagagttgcctgcttcttcaaaaacaagtaactcccagcatggaaacagtgccccttctttgttgatgccacttcctggaactaaagcattgccttcaatggacaaatatgctgtgtttaaaggaattgcagctgacaagtcctctgaaaatactgttccacctggagatcctggtgataaatatagtgctttcagagaacttgaacagacagcagagaataaacctttaggagaaagctttgcagaattcagatctgcaggaactgatgatggtttcaccgattttaaaacagccgatagtgtatcaccactagagccaccaacaaaagacaaaacttttccaccatccttcccctcaggaactatacaacagaaacaacaaacacaagtgaaaaaccctctgaacttagcagacctagatatgttttcctcagttaattgcagcagcgagaaaccattgtctttttcagctgtgtttagcacatcaaaatcagtttctacaccacagtcaacaggttctgctgctactatgacagcattggcagcaacaaaaacttctagtttggctgatgattttggagaattcagcctttttggggaatattctggtctagcacctgttggggagcaggatgactttgcagattttatggctttcagtaatagctctatttcatctgagcaaaagccggatgacaaatatgatgcccttaaagaggaagccagtcctgttcctctaaccagcaacgtgggcagcacagtgaagggtggacaaaactcgactgctgcgtctaccaagtacgatgtcttcagacaactttctctggaagggtctggactaggtgttgaagacctgaaagataacactccttcaggaaaaagtgatgatgattttgctgacttccactccagtaaattttcttccataaactcggacaaatccctgggagagaaagcagtggctttcagacacaccaaagaagactctgcatcagtgaagtccttagatctcccttccattggtggcagcagtgttggcaaggaggactctgaagatgcactctctgttcagtttgacatgaaattggctgatgtgggaggagatcttaagcatgtcatgtctgatagctctttggatttaccaacagttagtggccagcatcctcctgctgcagatatagaggacttaaaatatgctgcttttggaagctacagtagcaattttgcagtgagcacacttacaagctatgactggtcagacagggatgatgcaactcagggcagaaaactctctccatttgtcctctcagcaggaagtggatccccctcagccacctcaattcttcaaaagaaagagacttcatttggcagttctgaaaacatcaccatgacatctctctccaaagtaacgacctttgtaagtgaagatgctcttccagagaccaccttcccagctcttgccagttttaaagacacgattcctcagaccagtgagcaaaaggaatatgaaaacagagactataaagatttcacaaaacaggacctgcctacggctgaacggagccaggaggccacgtgtcccagcccagcgtccagtggtgcctctcaagaaaccccgaacgaatgttcggatgactttggagagtttcaaagtgaaaagcccaaaatcagcaaatttgacttcttagtagccacttcacaaagcaaaatgaaatccagtgaagaaatgatcaaaagtgagctggcaacctttgacctttctgttcaaggatcacacaagaggagtttgagccttggtgataaagaaataagccgttcttctccttctccagctttggagcagcctttcagagaccgttccaatactctgaatgagaagcccgccctgcccgtcatccgagacaagtacaaagacctgacgggagaggtggaggaaaatgagagatatgcatatgaatggcagagatgcctggggagtgccctgaatgtcattaagaaggcaaatgataccttaaatggaatcagtagtagttctgtttgcacagaagtaattcagtcagctcaaggcatggaatatttattaggtgttgttgaagtgtacagggtaaccaagcgtgtggagctggggataaaagccactgcagtgtgcagtgagaaactccagcagttgctgaaggacatcgataaagtgtggaataacctaatcggcttcatgtcactcgccacactcacaccagatgaaaactcgctggatttttcctcctgtatgttacggcctgggattaaaaatgctcaggagcttgcctgtggagtgtgcctcttgaatgtggactcgaggagccgggcattcaactcagaaacagacagtttcaagcttgcctgtggagggcaccagtatcacgccagctgtgccaacttctggatcaactgtgtcgaaccaaagcctcctggcctcgtcctgcctgacctgctctgaacaactcctctgtgaagcattgacttttttttttctgtgacaccccacggggtgacagggaccaataaatagaatgcgagcactgcacagttcgcttccctgaatcgatatgaagaacaccgcaagggacggggcccccgtcatccccacggccagtctgcaggacttcaggtaaaattgtcccacccaaactgcacgtggcaccagaagcttgctcacttatctctacttaagattttctgaaatacggaccacggctttcttgatctaaggaagaacttgctgctgcagtattgaaactgtgaagaactgacatttgaagaaaaatagattaccgttgcgggactagaatgggcgactgcttggagccagtgcttgtttttatctaggacacttactgtcctgtgaagtagaatacatttatctgcatttagtttgttaatgtctgaaatgaataaaaagaggaaattgcgattaaactgatgttctgctttttatggagaagattctgcccatctcccctggacagtagcaggcaggtgagggcagattttacccacttggttgtcacaactgaaccagttctctactccttcccttcacttctgtccactctcaagactttttcccaaaacatgcctgggcactctgcagccgtgaagaatgctcattttgacagaggcccaaatcctgtgtattaggataatatccttccccccgggagccttcgctgcaaacctgttctgccgcatgcaaagactgtgaccatggagttttctcagacaagatttggaaaggcagtggaatgaaatctctttgcagtggcctctctccaaatttccaaagatgactgcatagggaccaacactgcctgactttgcagtatctgtgagaaaaacctgaaaattaattcagggtgaaaatgtggagctctcggcctagtgtaaagtatcaagatgtatatttatgggatagatacatgacttagaagaagtagaagaaaattgtccagaaacagtactgaattttagatagaaaaggctcatgcttcctggagtagggaattgtctttgccatttaatgtgaatgcataaaattaggggaaaaacccaagtggctaagagctgtgttattcctgggaagaactaccaatctagggcacacgtctctctgaattgttgattatgcgctttatgaagagatttttcaatctcgtgtgctttactttgtgtggtttagaccctctgacctagacttttatttttaaactgaaaaagttggtcttgtctactataattgctgcttttacataatttattttcccctctcacggacaaattctgtcttgctccatcttacagcttttccatgttctccacagaaaggtgtggaacattttcattaaacagctgttgctgaggcttctgcttgaccttctgcgtgcccgaatgcacagagaggcaccgaggagagaaaggcttttctcactcgctcccgatgataccgtctctggccattcctgactgaggcagctcactctgaatgggcacctttggagcttttgcccaccacaaggctagtggggtgtttctaacaacacaagtgggacagcttttggcaggcttttcctgaggcctcggcgcttccatcctggacagcaccacttccacatggagctggaatgcaagcaggctgctaattggccttaaaaannnnnnnnnnnnnnnnnnnnnnnnnnnnnnnnnnnnnnnnnnnnnnnnnnnnnnnnnnnnnnnnnnnnnnnnnnnnnnnnnnnnnnnnnnnnnnnnnnnnnnnnnnnnnnnnnnnnnnnnnnnnnnnnnnnnnnnnnnnnnnnnnnnnnnnnnnnnnnnnnnnnnnnnnnnnnnnnnnnnnnnnnnnnnnnnnnnnnnnntccctttaacaccttcaaggtcaaatgcctgcctttgtgaacagttaataaactgacattttcagacatttgccattcagaagggagcattgtagcctgctgtagaccattccagcaaatgtcagaatgcagggcaagatgtgtgtcgactatgttttttatgtttaagttacttacttatttcttcaggtaagtgtgtaccaaataacaatactgaaaagccctccccttgccaggccgaggaaataaagcttaagtgaaacagctcttgggggaaaaatgccactttacaaatacttttctaacaaaatagcattataatgaagtttttacttaattccattatttatatgttgacgtgaatgtaagtggttaaaaagtattcatgtgggacatctcattactttgtagctgtggctttattaaccagtgaatgctgtggcccttagcgaaatgcgttgtcttctgcgtgatgtggaattcgcgcctgtattttaaaagatggtgtggtttctccccttgtttgtattttaataaacaactgctctaaaaaa

SEQ ID NO: 465 - DNA, 1918 bp, Human
  unsure 1176: unknown base
  unsure 1177: unknown base
  unsure 1178: unknown base
  unsure 1179: unknown base
  unsure 1180: unknown base
  unsure 1181: unknown base
  unsure 1182: unknown base
  unsure 1183: unknown base
  unsure 1184: unknown base
  unsure 1185: unknown base
  unsure 1186: unknown base
  unsure 1187: unknown base
  unsure 1188: unknown base
  unsure 1189: unknown base
  unsure 1190: unknown base
  unsure 1191: unknown base
  unsure 1192: unknown base
  unsure 1193: unknown base
  unsure 1194: unknown base
  unsure 1195: unknown base
  unsure 1196: unknown base
  unsure 1197: unknown base
  unsure 1198: unknown base
  unsure 1199: unknown base
  unsure 1200: unknown base
  unsure 1201: unknown base
  unsure 1202: unknown base
  unsure 1203: unknown base
  unsure 1204: unknown base
  unsure 1205: unknown base
  unsure 1206: unknown base
  unsure 1207: unknown base
  unsure 1208: unknown base
  unsure 1209: unknown base
  unsure 1210: unknown base
  unsure 1211: unknown base
  unsure 1212: unknown base
  unsure 1213: unknown base
  unsure 1214: unknown base
  unsure 1215: unknown base
  unsure 1216: unknown base
  unsure 1217: unknown base
  unsure 1218: unknown base
  unsure 1219: unknown base
  unsure 1220: unknown base
  unsure 1221: unknown base
  unsure 1222: unknown base
  unsure 1223: unknown base
  unsure 1224: unknown base
  unsure 1225: unknown base
  unsure 1749: unknown base
  unsure 1750: unknown base
  unsure 1751: unknown base
  unsure 1752: unknown base
  unsure 1753: unknown base
  unsure 1754: unknown base
  unsure 1755: unknown base
  unsure 1756: unknown base
  unsure 1757: unknown base
  unsure 1758: unknown base
  unsure 1759: unknown base
  unsure 1760: unknown base
  unsure 1761: unknown base
  unsure 1762: unknown base
  unsure 1763: unknown base
  unsure 1764: unknown base
  unsure 1765: unknown base
  unsure 1766: unknown base
  unsure 1767: unknown base
  unsure 1768: unknown base
  unsure 1769: unknown base
  unsure 1770: unknown base
  unsure 1771: unknown base
  unsure 1772: unknown base
  unsure 1773: unknown base
agttggacagtcaggccacgactcctagcccacggcggtgccccacctcccagcagccccttcagccccttgcccctgttgccccaaacctcagggttccctcttgcatattcatgggggaaccacagtgctgatgtgcacttccccactgtcagctcggctgcacctcgtgtggcgccaggtcccaagggcctctgcagaggccaggctgtgagccccttgcctgcctgctcccctgatgaggcaacagcttctctgaaatgagctgccggccaggagcaggcaggcaccagcctgtctttccttttctggtaattcctcagcactgaggctccgttcctgggcaccccaggattgaagggaacctcagaatcatgtcactgccattctagagtttcaatccaaggggtcccctttagctcatctccaagatgggtaaacgtagccaccattcagaaagcccagaaattcttgttcccacatcttagacccctgagcaacacaaggagaaaatgcagctgcttacctattaatatctactgagggacaatcagcaaagcctcaaaggagtcgtctcaggtagggtacttggcctgtggcaggagagacagaggcacaaacccacccacccatcagcttccggtggctgatcggggcccagggagggaagcaggtgaaacagcagggtgggggtgacttggcagtcatgcatctcctccccgactctgaggcctggcaggaggaggccacaccagcctcacctgccctgacccccgccccccaccctgtgagccctgtggctatggccgctggtcgcccttgtccccaaaatcaccatgcctgtggccacgtccctcatcttctccaaaagcatcattaagaacaagtgattttggatgatggatttttgatttacaaacggcgcatttcccttggagtggaacagaaaggaaaccatttaatggcgcccttcttttcaagcatgaatacattttaatgaaactattttattgtatttgaggaaatggagagttgaacattccaaccaatcaatagccaattaattgctataaagctaaaaagaaaataaataaatcctgagtctattttaaacactgcaaaaagttcagagcctcagaatctggccttcccctccataaggtgcacgagcatgtnnnnnnnnnnnnnnnnnnnnnnnnnnnnnnnnnnnnnnnnnnnnnnnnnnccctacacctcagacatacttgaaactcagaaacagcactgagtctccccatgccaattcttgcctgctgtcttcgacttgggtcagagaaggtgagcagacccggcagcagcctgtcccggggctcaggaagaggcaggcccatcccctggccccaagcacccagcacaacagagggtggcgggcagtgagggcctggcgttgcctgggccccacttctcagccccagctgctgggcctccaaggttgggctgaggatggagttttggctctgggtttgccctgactcctgctggaagacgctgccctggtttttcaccctctagtggccttggacattgagtatttgtagaaatgcagattacattgcaaatggaaacctttgccaggaagacacatgcattttgcttttaattctttgagacatttgattttgtcttagggactgacctttcagcatcaaagaaatacatatctactgtatccgccaaagtttgtgatgcctgcatagacgcttacttgtnnnnnnnnnnnnnnnnnnnnnnnnntacaaaaaaaccaacaacaaaaaccacaattgaattgcctttgaaagtgggagatgatctgtctccaacggattgaaaaaaaaaaatgcttcttaaaaaatgtgtatgttttgtattctttttttctagtagaaaataactgact

SEQ ID NO: 466 - protein, 87 aa, Human
SWTVRPRLLAHGGAPPPSSPFSPLPLLPQTSGFPLAYSWGNHSADVHFPTVSSAAPRVAPGPKGLCRGQAVSPLPACSPDEATASLK

SEQ ID NO: 467 - DNA, 4539 bp, Human
gaacgttgctgtggtagcgctcgggcgccatgttaggacgaaggggaaggaggagaagcgcttaaagcggcgggagcggtgcgggagaggggttggacccagggctgaggcaggcccccccctccctcccgcctcagtggatcatgcccagggcggcagcggcggcggttgcgggggggaagtgactgggcggtgccggcgccggagacgatgccgtttccagttacaacacagggatcacaacaaacacaaccgccacagaagcactatggcattacttctcctatcagcttagcagcccccaaggagactgactgcgtacttacacagaaactaattgagacattgaaaccctttggggtttttgaagaggaagaggaactgcagcgcaggattttaattttgggaaaactaaataacctggtaaaagagtggatacgagaaatcagtgaaagcaagaatcttccacaatctgtaattgaaaatgttggaggaaaaatttttacatttggatcttacagattaggagtgcatacaaaaggtgctgatattgatgcgttgtgtgttgcaccaagacatgttgatcgaagtgactttttcacctcattctatgataagttgaaattacaggaagaagtaaaagatttaagagctgttgaagaggcattcgtaccagttattaaactctgttttgatgggatagagattgatattttgtttgcaagattagcactgcagacaattcctgaagatttggatctacgagatgacagtctgctaaaaaatttagatataagatgtataagaagtcttaacggttgcagggtaaccgatgaaattttacatctagtaccaaacattgacaacttcaggttaactctgagagctatcaaactatgggccaaacgccacaacatctattccaatatattaggtttcctcggtggtgtttcctgggctatgctagtagcaagaacttgccagctttatccaaatgcaatagcatcaactcttgtacataaatttttcttggtattttctaaatgggaatggccaaatccagtgctattgaaacagcctgaagaatgcaatcttaatttgcctgtatgggacccaagggtaaaccccagtgataggtaccatcttatgcctataattacaccagcatacccacaacagaactccacgtacaatgtgtccgtttcaacacggatggtcatggttgaggagtttaaacaaggtcttgctatcacagatgaaattttgctgagtaaggcagagtggtccaaactttttgaagctccaaacttctttcaaaagtacaagcattatattgtacttctagcaagtgcaccaacagaaaaacaacgcctggaatgggtgggcttggtggaatcaaaaatccgaatcctggttggaagcttggagaagaatgaatttattacactggctcatgtgaatccccagtcatttccagcacccaaagaaaatcccgacaaggaagaatttcgcacgatgtgggtgattgggttagtgtttaaaaaaacagaaaactctgaaaacctcagtgttgatctcacctatgatattcagtctttcacagatacagtttataggcaagcaataaacagcaagatgtttgaggtggatatgaaaattgctgcaatgcatgtaaaaagaaagcaactccatcaactactacctaatcatgtgcttcagaaaaagaaaaagcattcaacagaaggtgtcaaattgacagctctcaatgacagcagcctcgacttgtctatggacagtgataacagcatgtctgtgccttcacctactagtgctacgaagaccagtccattgaacagttctggcagctctcagggcagaaacagtcctgctccagctgtaacagcagcatctgtgaccaacatacaggctactgaagtttctgtgccacaagtaaattccagtgaaagctcagggggtacatcgagtgaaagcattcctcaaactgccacacaaccagccatttctccaccaccaaagcctacggtctccagagttgtttcttcaacacgtctggtaaacccaccacctagatcttcaggaaatgcagcaacttcaggaaatgcagcaacaaaaatacctactcctatagtaggagtcaagaggacatcctcacctcataaagaagagagtcccaagaaaaccaaaacagaagaggatgaaacaagtgaagatgctaactgtcttgctttgagtggacatgataaaacagaagcaaaggaacaacttgatacagagacaagtacaactcaatcagaaactattcagacagcggcttctctgttggcctctcagaaaacatccagtacagacctttctgatatccctgctctccctgcaaatcctattcctgttatcaagaattcaataaaactgagattgaatcggtaaaaacaacctcaggggtccataaacaatatctgccaactcaacctgttgtcttcaaatgctaaaaaaggagaatggagggtacaagactagacatgactgaaatggatttgggttttttggtgacctcccttactgggctaatcagcacttgatcggaagtccaggttagtatgtgaagccaggagtactattattattgtgttagcaacagttgcattaactatttcaaaaattactgcctttaaaaaaaacaacctcaagctatatttgtattcataattgacatctggattgggtttatgtttgatgcattgtttggaaaatttgcaatacaaactggcataagaattacttattctgatgatgcacttttatgtatttttcattagaaagtagaactaattttagattttcagcttgatggattttcagtttttcctgaagaattttctttaccattagtcttcaaattggatactgttgtgcagtggtgtactgttatacttcagagaaagggtaagagtacatctagttcagttcctatgaggtagctgtaacccttaaaaatgaaacgtcaactctagggtacatttgacattgaaagaatagttaggaaataacttggttttgatagggtcatgattaagaaatgatatattggttttatttatggaattgttttatagtgcatacaaatcagcgatcagccagcaaatatttttctttgagcttgtgaaagctctgtgttcttttgccttcaatctgttgtcttcaaaacaaacaaacaaaaaaagcttcttgcgcctttccctcccctgttttcttcctttttctttttgcttgtatgcacaaggtaggacttacttcgtaagaaacaaaatgccagtattttcttaagccatgatgtgaaaccaatgaccctgtgaccacatggcacagaacactaaattttggtcccatggctgaaacttgagggtgactaaaagtaatgcctgtgaaacatgatatctatctgggatggccatttgatctctaaaaggaattttgtacactccacagaactcctatctatagtaaaattgattttcagttttaaatgtgggcaaaaaggcattttctccaagattttaaaactaattcttatttttaaatggtttaccaaaatttgtcagtacattttacgtgtagaagcattttaaaaatcatttctagcaagcacttgacatctagtcagctctctactcctttattttgttttatcaaaagattaagagctcctttctttgaataaaataatttctcataattaagcagtagaagatctatcttcacaaagtatgagggatgccagatgttgataaacttactctttctgaatctggacaaagtcgacttaacagatttttctgatgagcatgttttatgaatcctccattgtgctccattctatcacatgtgcatttttcatgttaaactgcaattacttaatctcttcccctatccttctaaattaattttctgaagttggagtgtagtcttttcccccttaggctatgcattaatcgaagctttcttttcaccatgactttataatgtctagtaaacaatatttctacttcccacatctttgctttacacagtcaccttgcccttccttccaccaccgaagaaaaaagatggtcatactaacaggtgaaatgtacaaggtgtctgtgtgttttgtgtagcttcagagttagattgaaattaccaggcacagatttagtcttgtcattttgtttacacattggggaaaacaattcagtttattaaacgtttcatgtaactgcacccaagttttgccaagctggaaacttggaccttttctgtgtagtgactttttaattatagttttcataacctggagatcagactgttgctttcgcatgatgtatgtagtgtctcatgactggagtttgctttgttttatagtatctgtactccttgtatttttcaagagctattttgtaaacagatgatgtatttctccattgaaaacacaataaaaaaaaaacagcacaaaaaaaaaaaaaaaaaaaaaaaaaaaaaaaa

SEQ ID NO: 468 - DNA, 1323 bp, Human
aataggggaaaataagccagatggataaaggaagtgctggtcaccctggaggtgcactggtttggggaaggctcctggcccccacagccctcttcggagcctgagcccggctctcctcactcacctcaacccccaggcggcccctccacagggcccctctcctgcctggacggctctgctggtctccccgtcccctggagaagaacaaggccatgggtcggcccctgctgctgcccctactgcccttgctgctgccgccagcatttctgcagcctagtggctccacaggatctggtccaagctacctttatggggtcactcaaccaaaacacctctcagcctccatgggtggctctgtggaaatccccttctccttctattacccctgggagttagccacagctcccgacgtgagaatatcctggagacggggccacttccacaggcagtccttctacagcacaaggccgccttccattcacaaggattatgtgaaccggctctttctgaactggacagagggtcagaagagcggcttcctcaggatctccaacctgcagaagcaggaccagtctgtgtatttctgccgagttgagctggacacacggagctcagggaggcagcagtggcagtccatcgaggggaccaaactctccatcacccaggctgtcacgaccaccacccagaggcccagcagcatgactaccacctggaggctcagtagcacaaccaccacaaccggcctcagggtcacacagggcaaacgacgctcagactcttggcacataagtctggagactgctgtgggggtggcagtggctgtcactgtgctcggaatcatgattttgggactgatctgcctcctcaggtggaggagaaggaaaggtcagcagcggactaaagccacaaccccagccagggaacccttccaaaacacagaggagccatatgagaatatcaggaatgaaggacaaaatacagatcccaagctaaatcccaaggatgacggcatcgtctatgcttcccttgccctctccagctccacctcacccagagcacctcccagccaccgtcccctcaagagcccccagaacgagaccctgtactctgtcttaaaggcctaaccaatggacagccctctcaagactgaatggtgaggccaggtacagtggcgcacacctgtaatcccagctactctgaagcctgaggcagaatcaagtgagcccaggagttcagggccagctttgataatggagcgagatgccatctctagttaaaaatatatattaacaataaagtaacaaatttaaaaagataaaaaaa

SEQ ID NO: 469 - protein, 303 aa, Human
MGRPLLLPLLPLLLPPAFLQPSGSTGSGPSYLYGVTQPKHLSASMGGSVEIPFSFYYPWELATAPDVRISWRRGHFHRQSFYSTRPPSIHKDYVNRLFLNWTEGQKSGFLRISNLQKQDQSVYFCRVELDTRSSGRQQWQSIEGTKLSITQAVTTTTQRPSSMTTTWRLSSTTTTTGLRVTQGKRRSDSWHISLETAVGVAVAVTVLGIMILGLICLLRWRRRKGQQRTKATTPAREPFQNTEEPYENIRNEGQNTDPKLNPKDDGIVYASLALSSSTSPRAPPSHRPLKSPQNETLYSVLKA

SEQ ID NO: 470 - DNA, 435 bp, Human
atattcagataggactgcactacattatttctcacacatgtatctgttaccatcaggtcaattcctagtatgcataaattttttaaccattggcttttaaaagagacctatgttgaaaacccctgaaaattcaccgaagaaaaatcattactctttttctcagtaaatcatatcatctgaaatattacaaatttcaaatttctaggtgctatattaattcaacattacaataattcttacctgattattcttacaagttttaagttgtggtagtttagtgattttttttaaagatgtgtgaaatgttctctgcaaaataattcaggccactgtctctttgtatatattattataattatttattatgaagaccagcgaattatgatatttaaagtgagagaacttaattatttgcaaaggtaagttacagcttgt

SEQ ID NO: 471 - DNA, 3053 bp, Human
gcgatggcggagagtccgactgaggaggcggcaacggcgggcgccggggcggcgggccccggggcgagcagcgttgctggtgttgttggcgttagcggcagcggcggcgggttcgggccgcctttcctgccggatgtgtgggcggcggcggcggcagcgggcggggccgggggcccggggagcggcctggctccgctgcccgggctcccgccctcagccgctgcccacggggccgcgctgcttagccactgggaccccacgctcagctccgactgggacggcgagcgcaccgcgccgcagtgtctactccggatcaagcgggatatcatgtccatttataaggagcctcctccaggaatgttcgttgtacctgatactgttgacatgactaagattcatgcattgatcacaggcccatttgacactccttatgaagggggtttcttcctgttcgtgtttcggtgtccgcccgactatcccatccacccacctcgggtcaaactgatgacaacgggcaataacacagtgaggtttaaccccaacttctaccgcaatgggaaagtctgcttgagtattctaggtacatggactggacctgcctggagcccagcccagagcatctcctcagtgctcatctctatccagtccctgatgactgagaacccctatcacaatgagcccggctttgaacaggagagacatccaggagacagcaaaaactataatgaatgtatccggcacgagaccatcagagttgcagtctgtgacatgatggaaggaaagtgtccctgtcctgaacccctacgaggggtgatggagaagtcctttctggagtattacgacttctatgaggtggcctgcaaagatcgcctgcaccttcaaggccaaactatgcaggacccttttggagagaagcggggccactttgactaccagtccctcttgatgcgcctgggactgatacgtcagaaagtgctggagaggctccataatgagaatgcagaaatggactctgatagcagttcatctgggacagagacagaccttcatgggagcctgagggtttagaccctgctcccatctccccttcccccactcaagagtcccagcagaatcccttccccccaccccagggatggagaggcactgtgtatctccctccagactcgaagtcatcctgcaagatggcaagaaccaagcaagctccgatcccagggtgtgggagtgggggcctgttcccggtctgacctccttggcactggagcatctggggcttcgttcatccattcatcccgtatcaggggccaaggtacctttacaggagcacctagagcgagggcctttggcaaaaacaaaacaaccaacacacctctccacagggccagctccttagggataagtggaagatggaaattgcaattccaagagggagtgtgcccaaatgatttatggggatacctggaagggagcttggggtgggggctgtctgtgacacttaagcagtctgggtggttgtctatttgtctgtcttcagtcttgaagcagggcttcccaatgcccttttcctccctgccttccttcccccattatttcccacaggccagcataattttgtttttcctaatttatagtcactgttctagacagaccaaagagaaggaacagtggtggagtctaggctgctgatcagtaagctttacctagcacctgagcacctttctcccctcccctctttcctcacccttttctagatgtaagacagaaggtaaatgtgactgggacttaaccaaggtcttggtaaagcctgcatggcaccgtaagaagctgaaaatactgtttgttcccgcaatcactgatttgaaaagttcccaacacaggcagctgctgtgtatatgggattagagccactacatagaatagtctcttacagattttcataaatactagtcacaataagggtatttttcttgggggtggagtaagggggagactgatgctagtccttgttgtattttgttgggctgtccttgtgtattttcaccccagcctgtagtcctcctcacttcaaccccagggatttgtggggagcaagggtagccaatggcagagggggttggggctgggactctggaggctcctccccttctttctcttccttctgcctcccccgtgcccccagctgctcttgtcactgtctctgatgggtatttgcctggctttgttgcttctctatctgtatttagctgcagtgatcctttagctggttggctcagaaaaaaaaaaatgtgctttaggtgccctgtaatcctgggcatcaagggaatccatccttcccctttttgatatgttctccccgtacttccagatttattgttatggctcccagtgggtattggcgattcttgtgatgcagggcctcagtcagtgtccagccatgcataagggagaggatagtgtgtacctgccctgccctctgctatgaaggtctctgccttgtggatcatgggactccccttggaggatctgtgcaaaggggggctgggcacaaaggagaatgtcctatttgggagggcaggaagcaaaggaactggacagggattggtgggcttggggaacggaagtttatcttggatacccttgaagaggctgggtctcttcacatgaagatcgaaaagggaccctgcttccaatttccctcttccattcctcgagctactccagggcttagaagaatgctcttggtctgtgggtccagtgttgtctgtcatccatttaagtgttcccactttcaagtgacaatcctctccttggccctgccatagggcagagcatgtctggcatagcagcctgacttttatgccctaatcttgagttgaggaaatatatgcacaggagtcaaagagatgtctttatatctgactgtatataaatgaagtttttttgttttttttgttttcctttttggtgcaataaagtttgttttggcagaaaaaaaaaaaaaaaaaaaaaaaaaaaaaaaaaaaaaaaaaaaaaaaaaaaaaaaaaaaaaaaaa

SEQ ID NO: 472 - protein, 246 aa, Human
MSIYKEPPPGMFVVPDTVDMTKIHALITGPFDTPYEGGFFLFVFRCPPDYPIHPPRVKLMTTGNNTVRFNPNFYRNGKVCLSILGTWTGPAWSPAQSISSVLISIQSLMTENPYHNEPGFEQERHPGDSKNYNECIRHETIRVAVCDMMEGKCPCPEPLRGVMEKSFLEYYDFYEVACKDRLHLQGQTMQDPFGEKRGHFDYQSLLMRLGLIRQKVLERLHNENAEMDSDSSSSGTETDLHGSLRV

SEQ ID NO: 473 - DNA, 3067 bp, Human
cctttgcccgccttggcggccggctctacgttccctgttctcgcctgcagctccgccatggctcctaaaggcagctccaaacagcagtctgaggaggacctgctcctgcaggatttcagccgcaatctctcggccaagtcctccgcgctcttcttcggaaacgcgttcatcgtgtctgccatccccatctggttatactggcgaatatggcatatggatcttattcagtctgctgttttgtatagtgtgatgaccctagtaagcacatatttggtagcctttgcatacaagaatgtgaaatttgttctcaagcacaaagtagcacagaagagggaggatgctgtttccaaagaagtgactcgaaaactttctgaagctgataatagaaagatgtctcggaaggagaaagatgaaagaatcttgtggaagaagaatgaagttgctgattatgaagctacaacattttccatcttctataacaacactctgttcctggtcgtggtcattgttgcttccttcttcatattgaagaacttcaaccccacagtgaactacatattgtccataagtgcttcatcaggactcatcgccctcctgtctactggctccaaatagaccatgtcagcttcaccccctggctttgtgtctatgggtggcctgtggtatatggaaaagtagcagggtggtcagggtgggagacacaagatgtttttatagtctagagcctttaaaaaacccagcagaatgtaattcagtatttgtttattggctgttttttgacagattgttgaaattaaatgaattgaaagggaaactcagagtactaggacgtttattaaaaggaaaaaaatgtcttgcaatgtgctgtaatcacaagaggagaaaataacttgtttccttgatctgtcagaggtcacagtaacctgggccgagctgttattatttattatataatagtagtaggaagttaataactggttctctgtgttccaagcacaatattacaacttcttttgaaccgtaaatatcagaatgaatcctcttcccaggggattgaacagaagcttaatgtttacaagtgtttgaatttgtgatctgaaataacacaaaattaaaaacatgatttctctaattttccaactagaggaagagaaacttgtggaaaagttctttttttttcttttttttttcttaaagaagggcagccaaggtagtaacctaaaaatagtgcccaggcatatgagagttgtcctacgaggttaaagaacacactgttccactgtatggctttggccctgagtggccagggaggtcaacttgaccctgccatgttggtttgacttactaagacacaggaatcactgttttccttgaccagggtctcacaccctggaggaatgttaagtaagagaaagaacctctttcctgaatattgacatgtaaaagaccaaagtaatttttctgaacttctgcaattctgagaactctccaaggaatttacagtgattttagtgcttgtcagcatttttccatgaggactttcatacatttgactctttagttcacaggttcccattgattgtgagcaagatatttatctctttagcccttggggatccagctgagagcaatctcttgcatttttttacccgtgtatgtacagatatcatttcttgtgtatgccatgacttgaaaaagtttgggaagctctttagcaatatcagctaaaaggatatgaaatcacaggtgatagcagttgtcattcagtaatttcctacaagcagcaccccaaaggaaatatagtcctaatctttactatccacttctaaatttaatgtgaatttcatacatgttattagttgttttctttataattttataaaaattattcatcgggagtttaacttccacttccatgctatcggatgtgttgggctccatgcaagaacttggaagaaaaacaggcaggaatgcatttgcataatgacccagatcatcattttctgcaactgagaattatatttcatcattgcttctagaagtctgcaattctttacttttctttggtgcattattatctaggtgccatcactggataatgtggagtgactagagaagtcacatatcactgtaaggtacagttagggtaacactttagaggtttattatttttaaaaaacttttcttgaactcctggccaacatggtgaaaccccgtctctactaaaaataccaaaattagccaggcgtgatggtgggcgcctgtaatctcagctacttgggaggctgaagcaggagaactgcctgaacccaggaggcagaggttgcggtgagtcgagatcgtgctactactgcctgggtggcaagggtgagactccatctcaaaaaagaaacaaaaaaacccaaaaagttttctttactgttggttaaaaaaaaaagccagaccatagtttgactggtggcatggaatttgtgtatcaaataaatgcatttgcttatttgacaaaccatcagtgtccactatttgttaccagagttgggccactatcttttaaaattgctggtgaaaacttgccactagatggcagtgcctgtatagatggggaaaaaattgccaccattcttggtataatacagtgtagcttagatgaggtggtgaaataggggtatcagccgaatattcctaatatagtttctcttgaattaataaactgaagatttgtaggaaaatgagtgagcaaaatttgtttactgttgtgaatttttcctacagcactgtttttaatcttgatgttttccaactttctgtactaatagatacatttctgtgcataagattataaagcatatactcacagttcagtagttttcgttaaggatttactgtgtgagtactttactgtgaggaattgcagaaccttttcccctctactcttgtctaaaagttctgtgtggcacacagagatgcgacctactcaatctgacttagtaaaaccatgctgtagaatttttgtcttaaaaagaccacatacccagcacccatgaaataaaagattcatctgtaaaaa

SEQ ID NO: 474 - protein, 185 aa, Human
MAPKGSSKQQSEEDLLLQDFSRNLSAKSSALFFGNAFIVSAIPIWLYWRIWHMDLIQSAVLYSVMTLVSTYLVAFAYKNVKFVLKHKVAQKREDAVSKEVTRKLSEADNRKMSRKEKDERILWKKNEVADYEATTFSIFYNNTLFLVVVIVASFFILKNFNPTVNYILSISASSGLIALLSTGSK

SEQ ID NO: 475 - DNA, 14977 bp, Human
cctgctcgctccatgttgccgcctctcccggtacctgctgctgctcccggggctgcgggaaatgcgagaggctgagccggggaggaggaacccgagcagcagcggcggcggcggcggccgcggcggcgggagccccccaggaggaggaccgggatccatgtgtctttcctggtgactaggatgtcgtcggaggaggacaagagcgtggagcagccgcagccgccgccaccaccccccgaggagcctggagccccggccccgagccccgcagccgcagacaaaagacctcggggccggcctcgcaaagatggcgcttcccctttccagagagccagaaagaaacctcgaagtagggggaaaactgcagtggaagatgaggacagcatggatgggctggagacaacagaaacagaaacgattgtggaaacagaaatcaaagaacaatctgcagaagaggatgctgaagcagaagtggataacagcaaacagctaattccaactcttcagcgatctgtgtctgaggaatcggcaaactccctggtctctgttggtgtagaagccaaaatcagtgaacagctctgcgctttttgttactgtggggaaaaaagttccttaggacaaggagacttaaaacaattcagaataacgcctggatttatcttgccatggagaaaccaaccttctaacaagaaggacattgatgacaacagcaatggaacctatgagaaaatgcaaaactcagcaccacgaaaacaaagaggacagagaaaagaacgatctcctcagcagaatatagtatcttgtgtaagtgtaagcacccagacagcttcagatgatcaagctggtaaactgtgggatgaactcagtctggttgggcttccagatgccattgatatccaagccttatttgattctacaggcacttgttgggctcatcaccgttgtgtggagtggtcactaggagtatgccagatggaagaaccattgttagtgaacgtggacaaagctgttgtctcagggagcacagaacgatgtgcattttgtaagcaccttggagccactatcaaatgctgtgaagagaaatgtacccagatgtatcattatccttgtgctgcaggagccggcacctttcaggatttcagtcacatcttcctgctttgtccagaacacattgaccaagctcctgaaagatcgaaggaagatgcaaactgtgcagtgtgcgacagcccgggagacctcttagatcagttcttttgtactacttgtggtcagcactatcatggaatgtgcctggatatagcggttactccattaaaacgtgcaggttggcaatgtcctgagtgcaaagtgtgccagaactgcaaacaatcgggagaagatagcaagatgctagtgtgtgatacgtgtgacaaagggtatcatactttttgtcttcaaccagttatgaaatcagtaccaaccaatggctggaaatgcaaaaattgcagaatatgtatagagtgtggcacacggtctagttctcagtggcaccacaattgcctgatatgtgacaattgttaccaacagcaggataacttatgtcccttctgtgggaagtgttatcatccagaattgcagaaagacatgcttcattgtaatatgtgcaaaaggtgggttcacctagagtgtgacaaaccaacagatcatgaactggatactcagctcaaagaagagtatatctgcatgtattgtaaacacctgggagctgagatggatcctttacagccaggtgaggaagtggagatagctgagctcactacagattataacaatgaaatggaagttgaaggccctgaagatcaaatggtattctcagagcaggcagctaataaagatgtcaacggtcaggagtccactcctggaattgttccagatacggttcaagtccacactgaagagcaacagaagagtcatccctcagaaagtcttgacacagatagtcttcttattgctgtatcatcccaacatacagtgaatactgaattggaaaaacagatttctaatgaagttgatagtgaagacctgaaaatgtcttctgaagtgaagcatatttgtggcgaagatcaaattgaagataaaatggaagtgacagaaaacattgaagtcgttacacaccagatcactgtgcagcaagaacaactgcagttgttagaggaacctgaaacagtggtatccagagaagaatcaaggcctccaaaattagtcatggaatctgtcactcttccactagaaaccttagtgtccccacatgaggaaagtatttcattatgtcctgaggaacagttggttatagaaaggctacaaggagaaaaggaacagaaagaaaattctgaactttctactggattgatggactctgaaatgactcctacaattgagggttgtgtgaaagatgtttcataccaaggaggcaaatctataaagttatcatctgagacagagtcatcattttcatcatcagcagacataagcaaggcagatgtgtcttcctccccaacaccttcttcagacttgccttcgcatgacatgctgcataattacccttcagctcttagttcctctgctggaaacatcatgccaacaacttacatctcagtcactccaaaaattggcatgggtaaaccagctattactaagagaaaattttctcctggtagacctcggtccaaacagggggcttggagtacccataatacagtgagcccaccttcctggtccccagacatttcagaaggtcgggaaatttttaaacccaggcagcttcctggcagtgccatttggagcatcaaagtgggccgtgggtctggatttccaggaaagcggagacctcgaggtgcaggactgtcggggcgaggtggccgaggcaggtcaaagctgaaaagtggaatcggagctgttgtattacctggggtgtctactgcagatatttcatcaaataaggatgatgaagaaaactctatgcacaatacagttgtgttgttttctagcagtgacaagttcactttgaatcaggatatgtgtgtagtttgtggcagttttggccaaggagcagaaggaagattacttgcctgttctcagtgtggtcagtgttaccatccatactgtgtcagtattaagatcactaaagtggttcttagcaaaggttggaggtgtcttgagtgcactgtgtgtgaggcctgtgggaaggcaactgacccaggaagactcctgctgtgtgatgactgtgacataagttatcacacctactgcctagaccctccattgcagacagttcccaaaggaggctggaagtgcaaatggtgtgtttggtgcagacactgtggagcaacatctgcaggtctaagatgtgaatggcagaacaattacacacagtgcgctccttgtgcaagcttatcttcctgtccagtctgctatcgaaactatagagaagaagatcttattctgcaatgtagacaatgtgatagatggatgcatgcagtttgtcagaacttaaatactgaggaagaagtggaaaatgtagcagacattggttttgattgtagcatgtgcagaccctatatgcctgcgtctaatgtgccttcctcagactgctgtgaatcttcacttgtagcacaaattgtcacaaaagtaaaagagctagacccacccaagacttatacccaggatggtgtgtgtttgactgaatcagggatgactcagttacagagcctcacagttacagttccaagaagaaaacggtcaaaaccaaaattgaaattgaagattataaatcagaatagcgtggccgtccttcagacccctccagacatccaatcagagcattcaagggatggtgaaatggatgatagtcgagaaggagaacttatggattgtgatggaaaatcagaatctagtcctgagcgggaagctgtggatgatgaaactaagggagtggaaggaacagatggtgtcaaaaagagaaaaaggaaaccatacagaccaggtattggtggatttgtggtgcggcaaagaagtcgaactgggcaagggaaaaccaaaagatctgtgatcagaaaagattcctcaggctctatttccgagcagttaccttgcagagatgatggctggagtgagcagttaccagatactttagttgatgaatctgtttctgttactgaaagcactgaaaaaataaagaagagataccgaaaaaggaaaaataagcttgaagaaactttccctgcctatttacaagaagctttctttggaaaagatcttctagatacaagtagacaaagcaagataagtttagataatctgtcagaagatggagctcagcttttatataaaacaaacatgaacacaggtttcttggatccttccttagatccactacttagttcatcctcggctccaacaaaatctggaactcacggtcctgctgatgacccattagctgatatttctgaagttttaaacacagatgatgacattcttggaataatttcagatgatctagcaaaatcagttgatcattcagatattggtcctgtcactgatgatccttcctctttgcctcagccaaatgtcaatcagagttcacgaccattaagtgaagaacagctagatgggatcctcagtcctgaactagacaaaatggtcacagatggagcaattcttggaaaattatataaaattccagagcttggcggaaaagatgttgaagacttatttacagctgtacttagtcctgcgaacactcagccaactccattgccacagcctcccccaccaacacagctgttgccaatacacaatcaggatgctttttcacggatgcctctcatgaatggccttattggatccagtcctcatctcccacataattctttgccgcctggaagcggactgggaactttctctgcaattgcacaatcctcttatcctgatgccagggataaaaattcagcctttaatccaatggcaagtgatcctaacaactcttggacatcatcagctcccactgtggaaggagaaaatgacacaatgtcgaatgcccagagaagcacgcttaagtgggagaaagaggaggctctgggtgaaatggcaactgttgccccagttctctacaccaatattaatttccccaacttaaaggaagaattccctgattggactactagagtgaagcaaattgccaaattgtggagaaaagcaagctcacaagaaagagcaccatatgtgcaaaaagccagagataacagagctgctttacgcattaataaagtacagatgtcaaatgattccatgaaaaggcagcaacagcaagatagcattgatcccagctctcgtattgattcggagctttttaaagatcctttaaagcaaagagaatcagaacatgaacaggaatggaaatttagacagcaaatgcgtcagaaaagtaagcagcaagctaaaattgaagccacacagaaacttgaacaggtgaaaaatgagcagcagcagcagcaacaacagcaatttggttctcagcatcttctggtgcagtctggttcagatacaccaagtagtgggatacagagtcccttgacacctcagcctggcaatggaaatatgtctcctgcacagtcattccataaagaactgtttacaaaacagccacccagtacccctacgtctacatcttcagatgatgtgtttgtaaagccacaagctccacctcctcctccagccccatcccggattcccatccaggatagtctttctcaggctcagacttctcagccaccctcaccgcaagtgttttcacctgggtcctctaactcacgaccaccatctccaatggatccatatgcaaaaatggttggtacccctcgaccacctcctgtgggccatagtttttccagaagaaattctgctgcaccagtggaaaactgtacacctttatcatcggtatctaggccccttcaaatgaatgagacaacagcaaataggccatcccctgtcagagatttatgttcttcttccacgacaaataatgacccctatgcaaaacctccagacacacctaggcctgtgatgacagatcaatttcccaaatccttgggcctatcccggtctcctgtagtttcagaacaaactgcaaaaggccctatagcagctggaaccagtgatcactttactaaaccatctcctagggcagatgtgtttcaaagacaaaggatacctgactcatatgcacgacccttgttgacacctgcacctcttgatagtggtcctggaccttttaagactccaatgcaacctcctccatcctctcaggatccttatggatcagtgtcacaggcatcaaggcgattgtctgttgacccttatgaaaggcctgctttgacaccaagacctatagataatttttctcataatcagtcaaatgatccatatagtcagcctccccttaccccacatccagcagtgaatgaatcttttgcccatccttcaagggctttttcccagcctggaaccatatcaaggccaacatctcaggacccatactcccaacccccaggaactccacgacctgttgtagattcttattcccaatcttcgggaacagctaggtccaatacagacccttactctcaacctcctggaactccccggcctactactgttgacccatatagtcagcagccccaaaccccaagaccatctacacaaactgacttgtttgttacacctgtaacaaatcagaggcattctgatccatatgctcatcctcctggaacaccaagacctggaatttctgtcccttactctcagccaccagcaacaccaaggccaaggatttcagagggttttactaggtcctcaatgacaagaccagtcctcatgccaaatcaggatcctttcctgcaagcagcacaaaaccgaggaccagctttacctggcccgttggtaaggccacctgatacatgttcccagacacctaggccccctggacctggtctttcagacacatttagccgtgtttccccatctgctgcccgtgatccctatgatcagtctccaatgactccaagatctcagtctgactcttttggaacaagtcaaactgcccatgatgttgctgatcagccaaggcctggatcagaggggagcttctgtgcatcttcaaactctccaatgcactcccaaggccagcagttctctggtgtctcccaacttcctggacctgtgtcaacttcaggagtaactgatacacagaatactgtaaatatggcccaagcagatacagagaaattgagacagcggcagaagttacgtgaaatcattctccagcagcaacagcagaagaagattgcaggtcgacaggagaaggggtcacaggactcacccgcagtgcctcatccagggcctcttcaacactggcaaccagagaatgttaaccaggctttcaccagacccccacctccctatcctgggaacattaggtctcctgttgcccctcctttaggacctagatatgctgttttcccaaaagatcagcgtggaccctatcctcctgatgttgctagtatggggatgagacctcatggatttagatttggatttccaggaggtagtcatggtaccatgccgagtcaagagcgcttccttgtgcctcctcagcaaatacagggatctggagtttctccacagctaagaagatcagtatctgtagatatgcctaggcctttaaataactcacaaatgaataatccagttggacttcctcagcatttttcaccacagagcttgccagttcagcagcacaacatactgggccaagcatatattgaactgagacatagggctcctgacggaaggcaacggctgcctttcagtgctccacctggcagcgttgtagaggcatcttctaatctgagacatggaaacttcattccccggccagactttccgggccctagacacacagaccccatgcgacgacctccccagggtctacctaatcagctacctgtgcacccagatttggaacaagtgccaccatctcaacaagagcaaggtcattctgtccattcatcttctatggtcatgaggactctgaaccatccactaggtggtgaattttcagaagctcctttgtcaacatctgtaccgtctgaaacaacgtctgataatttacagataaccacccagccttctgatggtctagaggaaaaacttgattctgatgacccttctgtgaaggaactggatgttaaagaccttgagggggttgaagtcaaagacttagatgatgaagatcttgaaaacttaaatttagatacagaggatggcaaggtagttgaattggatactttagataatttggaaactaatgatcccaacctggatgacctcttaaggtcaggagagtttgatatcattgcatatacagatccagaacttgacatgggagataagaaaagcatgtttaatgaggaactagaccttccaattgatgataagttagataatcagtgtgtatctgttgaaccaaaaaaaagggaacaagaaaacaaaactctggttctctctgataaacattcaccacagaaaaaatccactgttaccaatgaggtaaaaacggaagtactgtctccaaattctaaggtggaatccaaatgtgaaactgaaaaaaatgatgagaataaagataatgttgacactccttgctcacaggcttctgctcactcagacctaaatgatggagaaaagacttctttgcatccttgtgatccagatctatttgagaaaagagccaatcgagaaactgctggccccagtgcaaatgtcattcaggcatccactcaactacctgctcaagatgtaataaactcttgtggcataactggatcaactccagttctctcaagcttacttgctaatgagaaatctgataattcagacattaggccatcggggtctccaccaccaccaactctgccggcctccccatccaatcatgtgtcaagtttgcctcctttcatagcaccgcctggccgtgttttggataatgccatgaattctaatgtgacagtagtctctagggtaaaccatgttttttctcagggtgtgcaggtaaacccagggctcattccaggtcaatcaacagttaaccacagtctggggacaggaaaacctgcaactcaaactgggcctcaaacaagtcagtctggtaccagtagcatgtctggaccccaacagctaatgattcctcaaacattagcacagcagaatagagagaggccccttcttctagaagaacagcctctacttctacaggatcttttggatcaagaaaggcaagaacagcagcagcaaagacagatgcaagccatgattcgtcagcgatcagaaccgttcttccctaatattgattttgatgcaattacagatcctataatgaaagccaaaatggtggcccttaaaggtataaataaagtgatggcacaaaacaatctgggcatgccaccaatggtgatgagcaggttcccttttatgggccaggtggtaactggaacacagaacagtgaaggacagaaccttggaccacaggccattcctcaggatggcagtataacacatcagatttctaggcctaatcctccaaattttggtccaggctttgtcaatgattcacagcgtaagcagtatgaagagtggctccaggagacccaacagctgcttcaaatgcagcagaagtatcttgaagaacaaattggtgctcacagaaaatctaagaaggccctttcagctaaacaacgtactgccaagaaagctgggcgtgaatttccagaggaagatgcagaacaactcaagcatgttactgaacagcaaagcatggttcagaaacagctagaacagattcgtaaacaacagaaagaacatgctgaattgattgaagattatcggatcaaacagcagcagcaatgtgcaatggccccacctaccatgatgcccagtgtccagccccagccacccctaattccaggtgccactccacccaccatgagccaacccacctttcccatggtgccacagcagcttcagcaccagcagcacacaacagttatttctggccatactagccctgttagaatgcccagtttacctggatggcaacccaacagtgctcctgcccacctgcccctcaatcctcctagaattcagcccccaattgcccagttaccaataaaaacttgtacaccagccccagggacagtctcaaatgcaaatccacagagtggaccaccacctcgggtagaatttgatgacaacaatccctttagtgaaagttttcaagaacgggaacgtaaggaacgtttacgagaacagcaagagagacaacggatccaactcatgcaggaggtagatagacaaagagctttgcagcagaggatggaaatggagcagcatggtatggtgggctctgagataagtagtagtaggacatctgtgtcccagattcccttctacagttccgacttaccttgtgattttatgcaacctctaggaccccttcagcagtctccacaacaccaacagcaaatggggcaggttttacagcagcagaatatacaacaaggatcaattaattcaccctccacccaaactttcatgcagactaatgagcgaaggcaggtaggccctccttcatttgttcctgattcaccatcaatccctgttggaagcccaaatttttcttctgtgaagcagggacatggaaatctttctgggaccagcttccagcagtccccagtgaggccttcttttacacctgctttaccagcagcacctccagtagctaatagcagtctcccatgtggccaagattctactataacccatggacacagttatccgggatcaacccaatcgctcattcagttgtattctgatataatcccagaggaaaaagggaaaaagaaaagaacaagaaagaagaaaagagatgatgatgcagaatccaccaaggctccatcaactccccattcagatataactgccccaccgactccaggcatctcagaaactacctctactcctgcagtgagcacacccagtgagcttcctcaacaagccgaccaagagtcggtggaaccagtcggcccatccactcccaatatggcagcaggccagctatgtacagaattagagaacaaactgcccaatagtgatttctcacaagcaactccaaatcaacagacgtatgcaaattcagaagtagacaagctctccatggaaacccctgccaaaacagaagagataaaactggaaaaggctgagacagagtcctgcccaggccaagaggagcctaaattggaggaacagaatggtagtaaggtagaaggaaacgctgtagcctgtcctgtctcctcagcacagagtcctccccattctgctggggcccctgctgccaaaggagactcagggaatgaacttctgaaacacttgttgaaaaataaaaagtcatcttctcttttgaatcaaaaacctgagggcagtatttgttcagaagatgactgtacaaaggataataaactagttgagaagcagaacccagctgaaggactgcaaactttgggggctcaaatgcaaggtggttttggatgtggcaaccagttgccaaaaacagatggaggaagtgaaaccaagaaacagcgaagcaaacggactcagaggacgggtgagaaagcagcacctcgctcaaagaaaaggaaaaaggacgaagaggagaaacaagctatgtactctagcactgacacgtttacccacttgaaacagcagaataatttaagtaatcctccaacaccccctgcctctcttcctcctacaccacctcctatggcttgtcagaagatggccaatggttttgcaacaactgaagaacttgctggaaaagccggagtgttagtgagccatgaagttaccaaaactctaggacctaaaccatttcagctgcccttcagaccccaggacgacttgttggcccgagcccttgctcagggccccaagacagttgatgtgccagcctccctcccaacaccacctcataacaatcaggaagaattaaggatacaggatcactgtggtgatcgagatactcctgacagttttgttccctcatcctctcctgagagtgtggttggggtagaagtgagcaggtatccagatctgtcattggtcaaggaggagcctccagaaccggtgccgtcccccatcattccaattcttcctagcactgctgggaaaagttcagaatcaagaaggaatgacatcaaaactgagccaggcactttatattttgcgtcaccttttggtccttccccaaatggtcccagatcaggtcttatatctgtagcaattactctgcatcctacagctgctgagaacattagcagtgttgtggctgcattttccgaccttcttcacgtccgaatccctaacagctatgaggttagcagtgctccagatgtcccatccatgggtttggtcagtagccacagaatcaacccgggtttggagtatcgacagcatttacttctccgtgggcctccgccaggatctgcaaaccctcccagattagtgagctcttaccggctgaagcagcctaatgtaccatttcctccaacaagcaatggtctttctggatataaggattctagtcatggtattgcagaaagcgcagcactcagaccacagtggtgttgtcattgtaaagtggttattcttggaagtggtgtgcggaaatctttcaaagatctgacccttttgaacaaggattcccgagaaagcaccaagagggtagagaaggacattgtcttctgtagtaataactgctttattctttattcatcaactgcacaagcgaaaaactcagaaaacaaggaatccattccttcattgccacaatcacctatgagagaaacgccttccaaagcatttcatcagtacagcaacaacatctccactttggatgtgcactgtctcccccagctcccagagaaagcttctccccctgcctcaccacccatcgccttccctcctgcttttgaagcagcccaagtcgaggccaagccagatgagctgaaggtgacagtcaagctgaagcctcggctaagagctgtccatggtgggtttgaagattgcaggccgctcaataaaaaatggagaggaatgaaatggaagaagtggagcattcatattgtaatccctaaggggacatttaaaccaccttgtgaggatgaaatagatgaatttctaaagaaattgggcacttcccttaaacctgatcctgtgcccaaagactatcggaaatgttgcttttgtcatgaagaaggtgatggattgacagatggaccagcaaggctactcaaccttgacttggatctgtgggtccacttgaactgcgctctgtggtccacggaggtctatgagactcaggctggtgccttaataaatgtggagctagctctgaggagaggcctacaaatgaaatgtgtcttctgtcacaagacgggtgccactagtggatgccacagatttcgatgcaccaacatttatcacttcacttgcgccattaaagcacaatgcatgttttttaaggacaaaactatgctttgccccatgcacaaaccaaagggaattcatgagcaagaattaagttactttgcagtcttcaggagggtctatgttcagcgtgatgaggtgcgacagattgctagcatcgtgcaacgaggagaacgggaccatacctttcgcgtgggtagcctcatcttccacacaattggtcagctgcttccacagcagatgcaagcattccattctcctaaagcactcttccctgtgggctatgaagccagccggctgtactggagcactcgctatgccaataggcgctgccgctacctgtgctccattgaggagaaggatgggcgcccagtgtttgtcatcaggattgtggaacaaggccatgaagacctggttctaagtgacatctcacctaaaggtgtctgggataagattttggagcctgtggcatgtgtgagaaaaaagtctgaaatgctccagcttttcccagcgtatttaaaaggagaggatctgtttggcctgaccgtctctgcagtggcacgcatagcggaatcacttcctggggttgaggcatgtgaaaattataccttccgatacggccgaaatcctctcatggaacttcctcttgccgttaaccccacaggttgtgcccgttctgaacctaaaatgagtgcccatgtcaagaggtttgtgttaaggcctcacaccttaaacagcaccagcacctcaaagtcatttcagagcacagtcactggagaactgaacgcaccttatagtaaacagtttgttcactccaagtcatcgcagtaccggaagatgaaaactgaatggaaatccaatgtgtatctggcacggtctcggattcaggggctgggcctgtatgctgctcgagacattgagaaacacaccatggtcattgagtacatcgggactatcattcgaaacgaagtagccaacaggaaagagaagctttatgagtctcagaaccgtggtgtgtacatgttccgcatggataacgaccatgtgattgacgcgacgctcacaggagggcccgcaaggtatatcaaccattcgtgtgcacctaattgtgtggctgaagtggtgacttttgagagaggacacaaaattatcatcagctccagtcggagaatccagaaaggagaagagctctgctatgactataagtttgactttgaagatgaccagcacaagattccgtgtcactgtggagctgtgaactgccggaagtggatgaactgaaatgcattccttgctagctcagcgggcggcttgtccctaggaagaggcgattcaacacacc

SEQ ID NO: 476 - protein, 4911 aa, Human
MSSEEDKSVEQPQPPPPPPEEPGAPAPSPAAADKRPRGRPRKDGASPFQRARKKPRSRGKTAVEDEDSMDGLETTETETIVETEIKEQSAEEDAEAEVDNSKQLIPTLQRSVSEESANSLVSVGVEAKISEQLCAFCYCGEKSSLGQGDLKQFRITPGFILPWRNQPSNKKDIDDNSNGTYEKMQNSAPRKQRGQRKERSPQQNIVSCVSVSTQTASDDQAGKLWDELSLVGLPDAIDIQALFDSTGTCWAHHRCVEWSLGVCQMEEPLLVNVDKAVVSGSTERCAFCKHLGATIKCCEEKCTQMYHYPCAAGAGTFQDFSHIFLLCPEHIDQAPERSKEDANCAVCDSPGDLLDQFFCTTCGQHYHGMCLDIAVTPLKRAGWQCPECKVCQNCKQSGEDSKMLVCDTCDKGYHTFCLQPVMKSVPTNGWKCKNCRICIECGTRSSSQWHHNCLICDNCYQQQDNLCPFCGKCYHPELQKDMLHCNMCKRWVHLECDKPTDHELDTQLKEEYICMYCKHLGAEMDPLQPGEEVEIAELTTDYNNEMEVEGPEDQMVFSEQAANKDVNGQESTPGIVPDTVQVHTEEQQKSHPSESLDTDSLLIAVSSQHTVNTELEKQISNEVDSEDLKMSSEVKHICGEDQIEDKMEVTENIEVVTHQITVQQEQLQLLEEPETVVSREESRPPKLVMESVTLPLETLVSPHEESISLCPEEQLVIERLQGEKEQKENSELSTGLMDSEMTPTIEGCVKDVSYQGGKSIKLSSETESSFSSSADISKADVSSSPTPSSDLPSHDMLHNYPSALSSSAGNIMPTTYISVTPKIGMGKPAITKRKFSPGRPRSKQGAWSTHNTVSPPSWSPDISEGREIFKPRQLPGSAIWSIKVGRGSGFPGKRRPRGAGLSGRGGRGRSKLKSGIGAVVLPGVSTADISSNKDDEENSMHNTVVLFSSSDKFTLNQDMCVVCGSFGQGAEGRLLACSQCGQCYHPYCVSIKITKVVLSKGWRCLECTVCEACGKATDPGRLLLCDDCDISYHTYCLDPPLQTVPKGGWKCKWCVWCRHCGATSAGLRCEWQNNYTQCAPCASLSSCPVCYRNYREEDLILQCRQCDRWMHAVCQNLNTEEEVENVADIGFDCSMCRPYMPASNVPSSDCCESSLVAQIVTKVKELDPPKTYTQDGVCLTESGMTQLQSLTVTVPRRKRSKPKLKLKIINQNSVAVLQTPPDIQSEHSRDGEMDDSREGELMDCDGKSESSPEREAVDDETKGVEGTDGVKKRKRKPYRPGIGGFVVRQRSRTGQGKTKRSVIRKDSSGSISEQLPCRDDGWSEQLPDTLVDESVSVTESTEKIKKRYRKRKNKLEETFPAYLQEAFFGKDLLDTSRQSKISLDNLSEDGAQLLYKTNMNTGFLDPSLDPLLSSSSAPTKSGTHGPADDPLADISEVLNTDDDILGIISDDLAKSVDHSDIGPVTDDPSSLPQPNVNQSSRPLSEEQLDGILSPELDKMVTDGAILGKLYKIPELGGKDVEDLFTAVLSPANTQPTPLPQPPPPTQLLPIHNQDAFSRMPLMNGLIGSSPHLPHNSLPPGSGLGTFSAIAQSSYPDARDKNSAFNPMASDPNNSWTSSAPTVEGENDTMSNAQRSTLKWEKEEALGEMATVAPVLYTNINFPNLKEEFPDWTTRVKQIAKLWRKASSQERAPYVQKARDNRAALRINKVQMSNDSMKRQQQQDSIDPSSRIDSELFKDPLKQRESEHEQEWKFRQQMRQKSKQQAKIEATQKLEQVKNEQQQQQQQQFGSQHLLVQSGSDTPSSGIQSPLTPQPGNGNMSPAQSFHKELFTKQPPSTPTSTSSDDVFVKPQAPPPPPAPSRIPIQDSLSQAQTSQPPSPQVFSPGSSNSRPPSPMDPYAKMVGTPRPPPVGHSFSRRNSAAPVENCTPLSSVSRPLQMNETTANRPSPVRDLCSSSTTNNDPYAKPPDTPRPVMTDQFPKSLGLSRSPVVSEQTAKGPIAAGTSDHFTKPSPRADVFQRQRIPDSYARPLLTPAPLDSGPGPFKTPMQPPPSSQDPYGSVSQASRRLSVDPYERPALTPRPIDNFSHNQSNDPYSQPPLTPHPAVNESFAHPSRAFSQPGTISRPTSQDPYSQPPGTPRPVVDSYSQSSGTARSNTDPYSQPPGTPRPTTVDPYSQQPQTPRPSTQTDLFVTPVTNQRHSDPYAHPPGTPRPGISVPYSQPPATPRPRISEGFTRSSMTRPVLMPNQDPFLQAAQNRGPALPGPLVRPPDTCSQTPRPPGPGLSDTFSRVSPSAARDPYDQSPMTPRSQSDSFGTSQTAHDVADQPRPGSEGSFCASSNSPMHSQGQQFSGVSQLPGPVSTSGVTDTQNTVNMAQADTEKLRQRQKLREIILQQQQQKKIAGRQEKGSQDSPAVPHPGPLQHWQPENVNQAFTRPPPPYPGNIRSPVAPPLGPRYAVFPKDQRGPYPPDVASMGMRPHGFRFGFPGGSHGTMPSQERFLVPPQQIQGSGVSPQLRRSVSVDMPRPLNNSQMNNPVGLPQHFSPQSLPVQQHNILGQAYIELRHRAPDGRQRLPFSAPPGSVVEASSNLRHGNFIPRPDFPGPRHTDPMRRPPQGLPNQLPVHPDLEQVPPSQQEQGHSVHSSSMVMRTLNHPLGGEFSEAPLSTSVPSETTSDNLQITTQPSDGLEEKLDSDDPSVKELDVKDLEGVEVKDLDDEDLENLNLDTEDGKVVELDTLDNLETNDPNLDDLLRSGEFDIIAYTDPELDMGDKKSMFNEELDLPIDDKLDNQCVSVEPKKREQENKTLVLSDKHSPQKKSTVTNEVKTEVLSPNSKVESKCETEKNDENKDNVDTPCSQASAHSDLNDGEKTSLHPCDPDLFEKRANRETAGPSANVIQASTQLPAQDVINSCGITGSTPVLSSLLANEKSDNSDIRPSGSPPPPTLPASPSNHVSSLPPFIAPPGRVLDNAMNSNVTVVSRVNHVFSQGVQVNPGLIPGQSTVNHSLGTGKPATQTGPQTSQSGTSSMSGPQQLMIPQTLAQQNRERPLLLEEQPLLLQDLLDQERQEQQQQRQMQAMIRQRSEPFFPNIDFDAITDPIMKAKMVALKGINKVMAQNNLGMPPMVMSRFPFMGQVVTGTQNSEGQNLGPQAIPQDGSITHQISRPNPPNFGPGFVNDSQRKQYEEWLQETQQLLQMQQKYLEEQIGAHRKSKKALSAKQRTAKKAGREFPEEDAEQLKHVTEQQSMVQKQLEQIRKQQKEHAELIEDYRIKQQQQCAMAPPTMMPSVQPQPPLIPGATPPTMSQPTFPMVPQQLQHQQHTTVISGHTSPVRMPSLPGWQPNSAPAHLPLNPPRIQPPIAQLPIKTCTPAPGTVSNANPQSGPPPRVEFDDNNPFSESFQERERKERLREQQERQRIQLMQEVDRQRALQQRMEMEQHGMVGSEISSSRTSVSQIPFYSSDLPCDFMQPLGPLQQSPQHQQQMGQVLQQQNIQQGSINSPSTQTFMQTNERRQVGPPSFVPDSPSIPVGSPNFSSVKQGHGNLSGTSFQQSPVRPSFTPALPAAPPVANSSLPCGQDSTITHGHSYPGSTQSLIQLYSDIIPEEKGKKKRTRKKKRDDDAESTKAPSTPHSDITAPPTPGISETTSTPAVSTPSELPQQADQESVEPVGPSTPNMAAGQLCTELENKLPNSDFSQATPNQQTYANSEVDKLSMETPAKTEEIKLEKAETESCPGQEEPKLEEQNGSKVEGNAVACPVSSAQSPPHSAGAPAAKGDSGNELLKHLLKNKKSSSLLNQKPEGSICSEDDCTKDNKLVEKQNPAEGLQTLGAQMQGGFGCGNQLPKTDGGSETKKQRSKRTQRTGEKAAPRSKKRKKDEEEKQAMYSSTDTFTHLKQQNNLSNPPTPPASLPPTPPPMACQKMANGFATTEELAGKAGVLVSHEVTKTLGPKPFQLPFRPQDDLLARALAQGPKTVDVPASLPTPPHNNQEELRIQDHCGDRDTPDSFVPSSSPESVVGVEVSRYPDLSLVKEEPPEPVPSPIIPILPSTAGKSSESRRNDIKTEPGTLYFASPFGPSPNGPRSGLISVAITLHPTAAENISSVVAAFSDLLHVRIPNSYEVSSAPDVPSMGLVSSHRINPGLEYRQHLLLRGPPPGSANPPRLVSSYRLKQPNVPFPPTSNGLSGYKDSSHGIAESAALRPQWCCHCKVVILGSGVRKSFKDLTLLNKDSRESTKRVEKDIVFCSNNCFILYSSTAQAKNSENKESIPSLPQSPMRETPSKAFHQYSNNISTLDVHCLPQLPEKASPPASPPIAFPPAFEAAQVEAKPDELKVTVKLKPRLRAVHGGFEDCRPLNKKWRGMKWKKWSIHIVIPKGTFKPPCEDEIDEFLKKLGTSLKPDPVPKDYRKCCFCHEEGDGLTDGPARLLNLDLDLWVHLNCALWSTEVYETQAGALINVELALRRGLQMKCVFCHKTGATSGCHRFRCTNIYHFTCAIKAQCMFFKDKTMLCPMHKPKGIHEQELSYFAVFRRVYVQRDEVRQIASIVQRGERDHTFRVGSLIFHTIGQLLPQQMQAFHSPKALFPVGYEASRLYWSTRYANRRCRYLCSIEEKDGRPVFVIRIVEQGHEDLVLSDISPKGVWDKILEPVACVRKKSEMLQLFPAYLKGEDLFGLTVSAVARIAESLPGVEACENYTFRYGRNPLMELPLAVNPTGCARSEPKMSAHVKRFVLRPHTLNSTSTSKSFQSTVTGELNAPYSKQFVHSKSSQYRKMKTEWKSNVYLARSRIQGLGLYAARDIEKHTMVIEYIGTIIRNEVANRKEKLYESQNRGVYMFRMDNDHVIDATLTGGPARYINHSCAPNCVAEVVTFERGHKIIISSSRRIQKGEELCYDYKFDFEDDQHKIPCHCGAVNCRKWMN

SEQ ID NO: 477 - DNA, 2787 bp, Human
gcacagacgagatctcgatcgaaggcgagatggcggacgtgctagatcttcacgaggctgggggcgaagatttcgccatggatgaggatggggacgagagcattcacaaactgaaagaaaaagcgaagaaacggaagggtcgcggctttggctccgaagaggggtcccgagcgcggatgcgtgaggattatgacagcgtggagcaggatggcgatgaacccggaccacaacgctctgttgaaggctggattctctttgtaactggagtccatgaggaagccaccgaagaagacatacacgacaaattcgcagaatatggggaaattaaaaacattcatctcaacctcgacaggcgaacaggatatctgaaggggtatactctagttgaatatgaaacatacaaggaagcccaggctgctatggagggactcaatggccaggatttgatgggacagcccatcagcgttgactggtgttttgttcggggtccaccaaaaggcaagaggagaggtggccgaagacgcagcagaagtccagaccggagacgtcgctgacaggtcctctgttgtccaggtgttctcttcaagattccatttgaccatgcagccttggacaaataggactggggtggaacttgctgtgtttatatttaatctcttaccgtatatgcgtagtatttgagttgcgaataaatgttccatttttgttttctacatttaatgttactttcctgtcctaaaattgaaagttctaaagcatagcaaggctgtatggatcattgtgaagatacttctagggactgaactctatgtatttcttttttttcttttttttgagatagagtcttgctgtgttacccagggtggattgcagctgatcatagctcactgcagcttcaaactcttgggctcaagccatccttctgcctcactgtccctagtagttgggattacaggcacatgccaccatgcccagctaaatttttaatatttttgtagagatggggtcttgctgtgttacctgggctagttatgtgagtttctatattagacatagtctcaagtttcaggtagggtttaaagtagagacactggtcagtatttcttttttggggggaactaggagagcaggagtagaagtgagatgttaagatcttatggcactaaagacttactattctgttcctacatactctgttaggatcagatagatgttatagaaatgccttttgtttctcctgcccttcttgatgtcacagttttttgtacttccagctgtctaaaggcatgaatctcctcttggagcattctcccagacccttctttagaagagtctatactaagttcttggtgccctcttcggcagccaagggtgaaggccccatagaggagaggatccaaaggagcattgaggaggcccaagaggaaaaggatgtggctcaggctgggagggacttcagttagcatggtgggggagaaccagtaccacatacccagtaggtaataaggtgtccagcagaggatgaaggtcagcaagataagcagggccagtctcagggcccggagacgaacacggggacaattgtcaaaggagcgggggagggcaaattcaccagcaggggctaggaatttagaaaatatactgtaattcagacactcagcttctgatctgagtatagggtgaattgatggaggggcatagctagtgagacagagctcgcctcctacaaggaggagaatgttgcaaaccgttttccccttcccaacctgggactatatgatttcttacccccagggattatgatagaaatatgaagccaccaagtctagacttgatggtgttcaagaataaataatactgattgcctccctagtccttgtccagctaactcagctgtttataattgaagggattcaacaaaattatctctagcatcaggtgctagacatggttagaatctcaccatggtttagtgactggtagatagctattaggtaggtagataaataaatgatgctagaggcaacaggtctagggttaaggattaaggcctgggaattggagtctcaccatggctccccttccttgtctggggcctggacacactgaggacaatgcggctatagcagatggccatggcagtcagtggcagcagaaagaggcagcagaaggtgaagaggttataggtggtctcttgccattgagccttgaagctgcctttggtgacacactgagtgaaagggactgggccagctcagtggaccgtgtggaacaggaacagctggagtggagttgaggactattagaactggttcccctcaccacccaacctacccacctatgtcatactgtctcctcccaattcatccttaattccaagtgaagcagcacagtgctgagaaacagttcatccatggtgccatgttaaagaagttggaaatatatcttgaaaatcctatcttccttttaggcttgaatatgatgctgaacagtaagtttgttaaatcttggaacttaaaacaatcctgctttctcaagtactattctaacattgcgctttataagggatgatatttctaccacctcactcatatttttagctgaaatgattttcctggtatgtctgttattttgtggaaaaagaaatattgtgtaaaatgggtgctgccaaaattccaggccattttgcagggactctgaagtgacctttagtagtaatagtcttatgtgcagtaactataatggtaaagaatgttaaataataaaatttaacattttccaaatgct

SEQ ID NO: 478 - protein, 174 aa, Human
MADVLDLHEAGGEDFAMDEDGDESIHKLKEKAKKRKGRGFGSEEGSRARMREDYDSVEQDGDEPGPQRSVEGWILFVTGVHEEATEEDIHDKFAEYGEIKNIHLNLDRRTGYLKGYTLVEYETYKEAQAAMEGLNGQDLMGQPISVDWCFVRGPPKGKRRGGRRRSRSPDRRRR

SEQ ID NO: 479 - DNA, 1968 bp, Human
acagaaggcggggccagcgccgctgccgggtgctggaggcgccattggagccggcttggctggcgagcccggctgaggagcctcttgggtcgcacttaccgccgcgtccgctcccggtccctggcccctcagcggcatggcgtgcggggcgacgctgaagcggcccatggagttcgaggcggcgctgctgagccccggctccccgaagcggcggcgctgcgcccctctgcccggccccactccgggcctcaggcccccggacgccgagccgccgccgccgtttcagacgcagaccccaccgcagagtctgcagcagcccgccccgcccggcagcgagcggcgccttccaactccggagcaaatttttcagaacataaaacaagaatatagtcgttatcagaggtggagacatttagaagttgttcttaatcagagtgaagcttgtgcttcggaaagtcaacctcactcctcagcactcacagcacctagctctccaggttcctcatggatgaagaaggaccagcccacatttaccctccgacaagttggcataatatgtgagcgcctcttaaaagactatgaagataaaattcgggaggagtatgagcaaatcctcaataccaaactagcagaacaatatgaatcttttgtgaaattcacacatgatcagattatgcgacggtatgggacaaggccaacaagctatgtgtcatgaagctttgtcacatatctgggtatcaggtttgacctcaagagatggccgctgtacactttttgcaactggtttgatgtcacatttcagctccaactttgcatcctgagaacacttaaacgtttctgcaggtccattttatacaacttgaaagaccgtaaaactttctggttgccacaagcatatctttcttttctgctcatccaataaacagctgtgccctactgtgatagattttccaaacaaaaatacctggagcagcagtttagcaaaatatgccttcagtggcattcaacaaatggagtttccccaagcacagttctgtaagaagtgcgtgtgagagtgtgtgtatatgtgtgtatgtgtattttaagttattatttgtattgtgcaaaaattttttttttgatcttggggattctggctgtgaatttggtgcacgacaattatggtaaaaaaacatttgcttggtctaaagaagatcattaatgttttgtgaccatacaagttgtaacagtggattgtttttatgtgtaggtattgttaaatacagggactgtttccaggcacagaatatgaatcgtaagttaggatggacattagatgtgattatgatgataaagcgaaggtctgcggtcctgtatctacagacacgtggtgagaaattagaacaaactggagacgggccattgacacatggactctgcctgggcatgttaggttaattctttgactccaagccttaaaatactcacatggagtcagcgctcacctcattcacacaattatcatagagctccctggacactgaacctctaaagggaaaaggtctaccctggagccaggagcatcagggttggcttgggagcatgagaggtgagcccagggctaggcctgggccaggccccggcagcactgctacttgggaggagccacttcacctttgtattagttattaaaaaatataatttgggctgggcgcagtggctcacgcctgtaatcccagcactttgggagtccgaggcatgcggatcacttgaggtcaggagttcgagaccaccctggccaatatggtgaaaccccatctctactaaaaatacaacaaagttagccgggcgtggtggcaggcgtctgtaatcccagctgcttgggaggctgaggcagtagaatcacttgaaccctggaggtggcggttgcagtgagcacagatcatgccactgcactccagcctgggcaacaaaacgagacttcgtctc

SEQ ID NO: 480 - protein, 192 aa, Human
MACGATLKRPMEFEAALLSPGSPKRRRCAPLPGPTPGLRPPDAEPPPPFQTQTPPQSLQQPAPPGSERRLPTPEQIFQNIKQEYSRYQRWRHLEVVLNQSEACASESQPHSSALTAPSSPGSSWMKKDQPTFTLRQVGIICERLLKDYEDKIREEYEQILNTKLAEQYESFVKFTHDQIMRRYGTRPTSYVS

SEQ ID NO: 481 - DNA, 4113 bp, Human
tgaggcgcgggaggcccgcgccccgcggctcgctgtgcgtgggagggcgcgagcgaacgcgggcgaggagcggccgagccgctgaagaggagctgggcgccggccgcccggccgcgctcggcccgcggatcgcctccgcccggtcttcgccggccccggcccctggcgagatgccgtgtggggaggattggctcagccacccgctgggaatcgtgcagggattcttcgcccaaaatggagttaatcctgactgggagaagaaagtaattgagtattttaaggaaaagctgaaggaaaataatgctcctaagtgggtaccatcactgaacgaagttccccttcattatttgaaacctaatagttttgtgaaatttcgttgcatgattcaggatatgtttgaccctgagttttacatgggagtttatgaaacggttaaccaaaacacaaaagcacatgttcttcattttggaaaatatagagatgtagcagagtgtgggcctcaacaagaacttgatttaaactctccacgaaataccactttggaaagacagactttctattgtgttccggtgcctggggaatctacgtgggtaaaagaagcctatgttaatgcaaaccaagctcgagtcagtccctcaacatcctacactcctagtcgccacaagaggagttatgaagatgatgacgatatggacctacagcccaataagcagaaagaccaacatgcaggtgccagacaagcagggagtgttggtggtcttcaatggtgtggagagccaaaacgtttagaaactgaagcttctactgggcaacagctgaactctctgaacttgtcttctccttttgatttgaattttccattgccaggagagaagggccctgcatgccttgtgaaggtttatgaagattgggattgtttcaaagtaaatgacattcttgagctatatggcatactgtctgtggatcctgtgctgagtatactgaataatgatgaaagggatgcctctgcactgctggatccgatggagtgcacagacacagcagaggagcagagagtacacagtcctcctgcttcattagtgccgagaattcatgtgatcttagcccagaagttgcaacacatcaacccattattgcctgcctgccttaacaaagaggagagcaaaacctgtaagtttgtttcaagtttcatgtccgaattgtctccagtcagagcagaacttcttgggttccttactcatgcccttctgggggatagtttggctgctgaataccttatattacatctcatctccacagtatatacaagaagagatgtccttccactaggaaaatttacagttaacttgagtggttgcccacggaatagtaccttcacagaacacttgtatcgaattattcaacatcttgttccagcatcttttcgtctgcagatgactatagagaacatgaaccatttgaaattcattccccacaaagactacacagccaatcgcttggtcagtgggctcctccagctgcccagcaatacttcccttgtaatcgatgagactctcctggaacaggggcagctggataccccaggtgttcataatgtgacagccctgagcaacctcataacgtggcagaaggtggattatgacttcagctaccatcagatggaattcccctgcaatattaacgttttcattacttcggaggggaggtcactcctcccggcagactgccagattcacttacagccccagctaattccaccaaacatggaggagtacatgaacagccttctctcagcggtgctgccttccgtgctgaacaaattccgcatttatctaactcttttgagattcttggaatatagcatatctgatgaaataaccaaggcagttgaagatgactttgtggaaatgcggaagaacgaccctcagagcatcactgctgatgatcttcaccagctgctcgtggtggctcggtgtctgtctctcagtgctggtcagacaacgctgtcaagagaacgatggctgagagcaaagcagctagagtctttaagaagaacgaggcttcagcagcaaaaatgtgtgaatggaaatgaactttaaagatgtaatacctatgaagagtaatgggcaaactgtagccacataattgtaaaattcagatattcatttataccacattgttttataggtaatttctatcacaaaccagtgacatttcctgaaatcaagcctggtaacacctgatgtttatatgatattcagtaaggacttttaccttactgatttcatggagcttttgaagtttgttttataataattatataaattagtaatgatgtaaaaaaagtatttgatattaaaagtttaatattgataatgttgctgattgtaccatttccttagcttcagctgagtcataggccagactgttgaaatgctgaaatgaagaaggttgttgcagtttcaaagtcagaggaatcgtgcttcggatttcttatgttttctagttctctgtttttccagttcacagtgggttggggtgcattcagtagtccatctttggggaacggaggcgtacttgccattgattcacatgactacatgaaattctgtactgtcatttcccagatgtttggccacagaaactttttcccacttaacatttgttaacagcctgcaaaactaaacttgtacatggcagtggttcccagacttttgtattttatggaccggtagtaatatttccaaaaatctggggtactataaggttgccaatttaccttgccaagtaatccgaataaatcactgtattatcaccatttttttcataaaaggaaaggacaatctatctctgaataagaggagtcctttaaacggaatgaatgtggcttttgggggcaaaagaaaccaagacactacattgtctttattttctcctatcccagtgcatttgagaaccatgcataagggaatgctgtgctacaaagctgtgcccaaatatgaaaacaaaataggaaacttaaaaagcaataccccctttagaaagtttttattttcttaaatgtcattgagttgctttgattctattggatttttggcattttttatgggatcatcagttggttccaagtatgttagatcagctaacatctgctactccagtaacagcctcgtacaactgcaggtaggttttctccagaccaattagttttaatagagcaaactaacaacagactgtagtagcatggttatggcaaccagaatcttcagaaaggttaggacattactttttaagctgtcagtggtatcaaataacttacctagttggaggcagataaaggatcccttacgttttttcctataaggcctaaattgaaattgttaaccaaggaaacagggtcagccttgaaaaatcaaggaattcattgtacctaataactgaagtaaaaataactagttgttcaacttttcctaaactcaaatctatttttataaacaaatgtaaataatgtttatattagagttgaactggttttcatttttataactggtagactagaccttccttaaacttttagaaataaaatgaaggcttcactggatttgtgaggataaaatacattttctttaattgtcctagagcaaagtacattagtcaccatgtgttttttgtgccaatgtaacttgtaatttaccaaagaaaaatacatacattgcttggtcttgcagaaaagttcccttgaaagaacctttccaataaataaaacgtcccaaattagcagtaccttgggctgtttttcatgagtaagaagattcaccatcccatgtgatctgtgtggaaaaagaccatgtcctcttggtggaagacatgagagagctgaactgaagtggaggaggtggtgcaagagggaccttcctgctcaaggcccgcccaggcagcggaatagagtgcagtgcttggctgcagaaaccctttgtccctcacctatatatacacggacagtcaagtttgttgctctaacgtaaggcacagcgttaatcctgtatggccaggaaactgagtagactcctgtgtaaccctgtttggaactttgccttcttaaaatgatttttc

SEQ ID NO: 482 - protein, 642 aa, Human
MPCGEDWLSHPLGIVQGFFAQNGVNPDWEKKVIEYFKEKLKENNAPKWVPSLNEVPLHYLKPNSFVKFRCMIQDMFDPEFYMGVYETVNQNTKAHVLHFGKYRDVAECGPQQELDLNSPRNTTLERQTFYCVPVPGESTWVKEAYVNANQARVSPSTSYTPSRHKRSYEDDDDMDLQPNKQKDQHAGARQAGSVGGLQWCGEPKRLETEASTGQQLNSLNLSSPFDLNFPLPGEKGPACLVKVYEDWDCFKVNDILELYGILSVDPVLSILNNDERDASALLDPMECTDTAEEQRVHSPPASLVPRIHVILAQKLQHINPLLPACLNKEESKTCKFVSSFMSELSPVRAELLGFLTHALLGDSLAAEYLILHLISTVYTRRDVLPLGKFTVNLSGCPRNSTFTEHLYRIIQHLVPASFRLQMTIENMNHLKFIPHKDYTANRLVSGLLQLPSNTSLVIDETLLEQGQLDTPGVHNVTALSNLITWQKVDYDFSYHQMEFPCNINVFITSEGRSLLPADCQIHLQPQLIPPNMEEYMNSLLSAVLPSVLNKFRIYLTLLRFLEYSISDEITKAVEDDFVEMRKNDPQSITADDLHQLLVVARCLSLSAGQTTLSRERWLRAKQLESLRRTRLQQQKCVNGNEL

SEQ ID NO: 483 - DNA, 2297 bp, Human
agcctcggggcttgacgggattgtggcggtcctctctcccaattcggaagctacagctacctccggacgctctcaagatggcgacctctctgggttccaacacctacaacaggcagaactgggaggatgcggacttccccattctgtgccagacatgtcttggagaaaacccatatatccgaatgaccaaagaaaagtatgggaaggaatgcaaaatctgtgccaggccattcacagtgtttcgctggtgccctggagtccgcatgcgtttcaagaagactgaagtgtgccaaacctgcagtaaattgaagaatgtctgtcagacctgcctcttagacctagagtatggcctgcccatccaggttcgtgacgcaggattgtcttttaaagatgacatgccaaagtcagatgtcaacaaagagtactatacacagaatatggagagagagatttctaactctgatggaacacggccagttggcatgctggggaaagccacatctaccagtgacatgctgctcaaactggcccggaccacaccctactacaaaaggaatcgaccccacatttgctccttctgggtgaaaggagagtgtaagagaggagaggaatgtccatacagacatgagaagcctacagatccagatgacccccttgctgatcagaatattaaagaccgttattacggaatcaatgatcctgtagctgacaagcttctaaagcgggcttcaacaatgcctcggctggacccaccagaggataaaactatcaccacactatatgttggtggtctaggtgataccattactgagacagatttaagaaatcatttctaccagttcggagagatccggacgatcactgttgtgcagagacagcagtgtgctttcatccagtttgccacacggcaggctgcagaagtggctgctgagaagtcctttaataagttgattgtaaatggccgcagactgaatgtgaaatggggaagatcccaggcagccagaggaaaagaaaaagagaaagatggaactacagactctgggatcaaactagaacctgttccaggattgccaggagctcttcctcctcctcctgcagcagaagaagaagcctctgccaactacttcaacttgcccccaagtggtcctccagctgtggtgaacattgctctgccaccgccccctggcattgctccacccccacccccaggttttgggccacacatgttccacccaatgggaccaccccctcctttcatgcgggctccaggaccaatccactatccttctcaggaccctcagaggatgggagctcatgctggaaaacacagcagcccctagcaccttgtcaccactctggggctctgtggaagaaagggcacttaaaactcccagtaaatcttggaataaatatatttttccttcccttgtagtttccatggtagctgaatgtgctcagatgtgagcagtcagagactgacagccatgctttcctatacttgttcaaaggatcgatggaccgtaaataagctgccattaacacatctggttactgctgtaacatgactaataaaaccgaacgcctgttccccttacccgtgtgggggacacgcagatgagtgaattggaatgtccagcagagttaccctcccaattatatgttcattttgtatattttttggtcgggggaaaaattgacctgcagtaaaaaaacctttgaccatttttatgtccattggatactttcctttttatcatcttaaaaaaagataactagtactaatcattgtagtggcctaagtgtgatttaactcttgaagtcacaccctccgaaagatgagtagaaaccagcaccagcacagcccagatcttctctttcctctccttttcctcatttattcctaaaggaatctgaccattttacgtctctacggcccaaaaaaagacaaaaataaaaattcctttttattcctgtcaactggatggaaacacaaatttcatggagctgtgtaccatcgaagaaacctggtgtctggcatgaaattactgtaaagaacttcctgtaaaacacgttctttaacaaactgaaatgaaaagcattggagcgtctgaatgaaagacgtgacctcctgctgggactctgatggtcttcagcattcaccttcgtgtgtcttcagtgtctcattgtcatccctgcttctgtttggtcttagagtgtttggatataactgaattgtagatggtaaaggaaatttgatgtgttttttgtttttaaataattaaaacgggtcaattttt

SEQ ID NO: 484 - protein, 420 aa, Human
MATSLGSNTYNRQNWEDADFPILCQTCLGENPYIRMTKEKYGKECKICARPFTVFRWCPGVRMRFKKTEVCQTCSKLKNVCQTCLLDLEYGLPIQVRDAGLSFKDDMPKSDVNKEYYTQNMEREISNSDGTRPVGMLGKATSTSDMLLKLARTTPYYKRNRPHICSFWVKGECKRGEECPYRHEKPTDPDDPLADQNIKDRYYGINDPVADKLLKRASTMPRLDPPEDKTITTLYVGGLGDTITETDLRNHFYQFGEIRTITVVQRQQCAFIQFATRQAAEVAAEKSFNKLIVNGRRLNVKWGRSQAARGKEKEKDGTTDSGIKLEPVPGLPGALPPPPAAEEEASANYFNLPPSGPPAVVNIALPPPPGIAPPPPPGFGPHMFHPMGPPPPFMRAPGPIHYPSQDPQRMGAHAGKHSSP

SEQ ID NO: 485 - DNA, 917 bp, Human
gaattttggcacaaactgggctgctgtgtggtagagaaaccccagccgaagaagaagagaagacggattgaccggaccatgattggggaaccaatgaattttgttcacctgactcacattggctcaggggagatgggggccggagatggacttgccatgacaggtgcagttcaggagcagatgagatccaagggaaaccgagataggccatggagcaattctaggggcttatagctccaataatggaatggttctgccatcttgaaacccccattctgtttccagcccagaagaaatgctgcccctaccagatccctccttgaaccagtgatctaaggacccctcttttccctatctgcctaacagtgcctcacaaggcttgggggctggactccctctactccctctggccatagcccctcctggagatggggtcaaggcagcaggactgatcaagtgactactggttagccagaggagctcagctgaagccctggaaaccctcaggtctgagataggagttctctaggaacctggaatgagttcctgtctcctgaatgatggtctgggtgccacctgtttttaaactcttaaacctggaactccttaaatggggtaggtgggtgagattatcaaagctgaagctggctttgctgagaagctccctacctccctgcccttctcctccttcctgctggaatgaactaaagcagatgtcaagcaggggctggtgggggtgcctactcccttttccactctatctttagatttcaaaccttaggcttacagcccctcaatatctctctgctaacaccagtgtctctttctagttaggcctctaatcttctgtttctgtttaccagcttcccagcaactttccttttttaaaatattaaaaatttaattcaggttctctt

SEQ ID NO: 486 - DNA, 5431 bp, Human
gggggctttgtgcgcggcggcggcgggagaggcggcggcggcggccagcacggaggcggaggccgagggggctgtgcacaggtcgccgcggagaggcgtgcgaattccgagccgagcgccgaggaccgtgctacccaggccgggctgccagccgcaggctcctctctggcagcagcggcggcgcggcgacccccgtccctcggcctccccttcccatcccacctcccgagccttcctcttcccgcagcacgcccggcccggcccggccgtggccctcctcagtgccggccgccatggcagaggcgtccggcgcggggaaaatctagcccggggatttcatgcggcctagctcggttccgcctcctcctcgcgcggccccagcggctgcccgcaccccagccccactccgggcctccgtgtctctcctgtgatcgcactgacacggccggggggttagaatggaacaaactgaaggcccgatgagagaaagggaaagttaaggatgctggagcagaacaatggatttctctttctctttcatgcaagggatcatgggaaacacaattcagcaaccacctcaactcattgactccgccaacatccgtcaggaggatgcctttgataacaacagtgacattgctgaagatggtggccagacaccatatgaagctactttgcagcaaggctttcagtacccagctacaacagaagatcttcctccactcacaaatgggtatccatcatcaatcagtgtgtatgaaactcaaaccaaataccagtcatataatcagtatcctaatgggtcagccaatggctttggtgcagttagaaactttagccccactgactattatcattcagaaattccaaacacaagaccacatgaaattctggaaaaaccttcccctccacagccaccacctcctccttcggtaccacaaactgtgattccaaagaagactggctcacctgaaattaaactaaaaataaccaaaactatccagaatggcagggaattgtttgagtcttccctttgtggagaccttttaaatgaagtacaggcaagtgagcacacgaaatcaaagcatgaaagcagaaaagaaaagaggaaaaaaagcaacaagcatgactcatcaagatctgaagagcgcaagtcacacaaaatccccaaattagaaccagaggaacaaaatagaccaaatgagagggttgacactgtatcagaaaaaccaagggaagaaccagtactaaaagaggaagccccagttcagccaatactatcttctgttccaacaacggaagtgtccactggtgttaagtttcaggttggcgatcttgtgtggtccaaggtgggaacctatccttggtggccttgtatggtttcaagtgatccccagcttgaggttcatactaaaattaacacaagaggtgcccgagaatatcatgtccagttttttagcaaccagccagagagggcgtgggttcatgaaaaacgggtacgagagtataaaggtcataaacagtatgaagaattactggctgaggcaaccaaacaagccagcaatcactctgagaaacaaaagattcggaaaccccgacctcagagagaacgtgctcagtgggatattggcattgcccatgcagagaaagcattgaaaatgactcgagaagaaagaatagaacagtatacttttatttacattgataaacagcctgaagaggctttatcccaagcaaaaaagagtgttgcctccaaaaccgaagttaaaaaaacccgacgaccaagatctgtgctgaatactcagccagaacagaccaatgcaggggaggtggcctcctcactctcaagtactgaaattcggagacatagccagaggcggcacacaagtgcggaagaggaagagccaccgcctgttaaaatagcctggaaaactgcggcagcaaggaaatccttaccagcttccattacgatgcacaaagggagcctggatttgcagaagtgtaacatgtctccagttgtgaaaattgaacaagtgtttgctcttcagaatgctacaggggatgggaaatttatcgatcaatttgtttattcaacaaagggaattggtaacaaaacagaaataagtgtcagggggcaagacaggcttataatttctacaccaaaccagagaaatgaaaagccaacgcagagtgtatcatctcctgaagcaacatctggttctacaggctcagtagaaaagaagcaacagagaagatcaattagaactcgttctgaatcagagaaatccactgaggttgtgccaaagaagaagatcaaaaaggagcaggttgaaacagttcctcaggctacagtgaagactggattacagaaaggtgccagcgagatttcagattcctgtaaacctctaaagaaaaggagtcgcgcctcaactgatgtagaaatgactagttcagcatacagagacacatctgactccgattctagaggactgagtgacctgcaggtaggctttggaaagcaagtagatagcccttcagctactgcagatgcagacgtttctgatgtgcagtccatggattcaagtttgtcgagaagaggcactggaatgagtaagaaggacactgtatgtcagatttgtgaaagctctggtgactctctgattccttgtgagggagagtgctgcaaacactttcacctggagtgcctgggattggcatcacttcctgatagcaagttcatctgcatggaatgtaaaactgggcagcacccatgtttttcgtgtaaagtgtctggtaaagatgtgaagcgttgttctgttggtgcttgtgggaaattttatcatgaagcctgtgtccgcaaattccccactgccatctttgaatcaaaaggattccgctgtcctcagcactgctgctctgcctgctctatggagaaagatatccacaaagcaagtaaaggccgcatgatgagatgtttaagatgtccagttgcctatcactctggagatgcttgcattgcggccggaagcatgttagtatcctcctacattctcatctgtagtaatcattccaaacggagcagtaattcttctgctgtaaatgtaggcttttgtttcgtttgtgccagagggctgatagttcaggaccattcagaccccatgttcagttcatatgcctataagtcccactacctactgaatgaatcaaatcgtgctgagttgatgaaattacctatgattccttcttcgtcagcttccaaaaagaaatgtgagaaaggtggaagattgctctgctgtgaatcgtgcccagcttccttccacccggaatgcctaagcatagaaatgccagaaggctgctggaattgtaatgactgtaaagctggcaagaaactacattacaagcagattgtttgggtcaaattgggaaattacagatggtggccagcagagatctgcaaccccaggtctgtgccactgaacatccagggccttaaacatgacttgggggacttccctgtattcttctttggttctcatgactactactgggtacaccagggcagagtgttcccttatgttgaaggagacaaaagctttgctgaagggcagactagtattaacaagaccttcaaaaaggcactggaagaagctgcaaaacgtttccaggaattgaaagcacaaagagaaagtaaagaagccctagagattgaaaaaaactcaagaaaaccccctccctacaaacacatcaaagctaacaaagtaataggaaaggtgcagatccaggttgctgacctgtcagagattccccgctgtaactgcaagccagctgatgaaaacccttgtggcttggaatcggagtgcctgaacagaatgttgcagtatgaatgccacccgcaggtgtgcccagctggagatcgttgtcagaaccagtgctttacaaagagactataccctgatgcagagatcatcaaaacggagcggagaggctggggcctcaggaccaaaaggagcattaagaagggtgaatttgtaaatgaatacgtcggtgaattaattgatgaagaagaatgcagattgcgaatcaagcgagcccacgagaacagtgtaactaatttttatatgttaactgttaccaaggaccgtataattgatgccggcccaaaaggaaattattctcgcttcatgaaccacagttgtaatcccaactgtgaaacacaaaagtggacagtgaatggagatgttcgagtgggactatttgctctctgtgatattcctgcagggatggagttaacatttaattataacctagattgtctgggcaacggcagaacggagtgccactgtggagcagataactgcagtggttttctaggagtgcggccaaagtcggcatgtgcgtcaacaaatgaagagaaggcaaaaaatgctaagttaaaacagaagagacgaaagatcaaaacagaaccaaagcagatgcatgaagattactgttttcaatgtggagatggtggagagctggtcatgtgtgacaaaaaagactgtcccaaagcataccacctcctatgccttaacctgactcagccaccatatggaaagtgggagtgtccgtggcatcagtgcgatgagtgcagcagtgcagctgtttccttctgtgaattctgtccacattcattttgtaaagatcatgaaaagggggccctggttccctctgcactggaaggccgcctctgctgctcggaacatgaccccatggctcctgtgtcaccagaatactggagcaagataaaatgtaaatgggaatcacaagatcatggagaagaagtaaaagaataaatgtgtggtgtcccctcctttctatttaagtgaaaaaagcaaatagatcatgcatttaaaaagaagagactgctacagtgcatacagcctttgccatcggaactgccttattaaagcaaaaatgggaaaccagttcatgcaggcagaagcagttggtggtgtctggtttttgtttgatttggttggtttgggattcttttgtggagggttaaattcccttggtcttttcttgccttttattgtgcttcagtgccattgcagcttgaaaaagaaatgtttttgctgttaaaataagaacaaagagaaaagtaagttttgttaatgagataaatttaaagtctaagatgtgttccttggttgtataaagcaaaagtagccatcattcctttatttattttcatttttaggaatttcaagaagtgtagttcaatagtctaatcaagtgtgtgtgtgttttaagtaggaatctgagaaagccctctaggaaagggtatgataagctttatatacctctttactgagcagtaggtaggctcacttctctttcccttcaaaatgcttttcataggcttagagaagggctctatggaagtattaaa

SEQ ID NO: 487 - protein, 1437 aa, Human
MDFSFSFMQGIMGNTIQQPPQLIDSANIRQEDAFDNNSDIAEDGGQTPYEATLQQGFQYPATTEDLPPLTNGYPSSISVYETQTKYQSYNQYPNGSANGFGAVRNFSPTDYYHSEIPNTRPHEILEKPSPPQPPPPPSVPQTVIPKKTGSPEIKLKITKTIQNGRELFESSLCGDLLNEVQASEHTKSKHESRKEKRKKSNKHDSSRSEERKSHKIPKLEPEEQNRPNERVDTVSEKPREEPVLKEEAPVQPILSSVPTTEVSTGVKFQVGDLVWSKVGTYPWWPCMVSSDPQLEVHTKINTRGAREYHVQFFSNQPERAWVHEKRVREYKGHKQYEELLAEATKQASNHSEKQKIRKPRPQRERAQWDIGIAHAEKALKMTREERIEQYTFIYIDKQPEEALSQAKKSVASKTEVKKTRRPRSVLNTQPEQTNAGEVASSLSSTEIRRHSQRRHTSAEEEEPPPVKIAWKTAAARKSLPASITMHKGSLDLQKCNMSPVVKIEQVFALQNATGDGKFIDQFVYSTKGIGNKTEISVRGQDRLIISTPNQRNEKPTQSVSSPEATSGSTGSVEKKQQRRSIRTRSESEKSTEVVPKKKIKKEQVETVPQATVKTGLQKGASEISDSCKPLKKRSRASTDVEMTSSAYRDTSDSDSRGLSDLQVGFGKQVDSPSATADADVSDVQSMDSSLSRRGTGMSKKDTVCQICESSGDSLIPCEGECCKHFHLECLGLASLPDSKFICMECKTGQHPCFSCKVSGKDVKRCSVGACGKFYHEACVRKFPTAIFESKGFRCPQHCCSACSMEKDIHKASKGRMMRCLRCPVAYHSGDACIAAGSMLVSSYILICSNHSKRSSNSSAVNVGFCFVCARGLIVQDHSDPMFSSYAYKSHYLLNESNRAELMKLPMIPSSSASKKKCEKGGRLLCCESCPASFHPECLSIEMPEGCWNCNDCKAGKKLHYKQIVWVKLGNYRWWPAEICNPRSVPLNIQGLKHDLGDFPVFFFGSHDYYWVHQGRVFPYVEGDKSFAEGQTSINKTFKKALEEAAKRFQELKAQRESKEALEIEKNSRKPPPYKHIKANKVIGKVQIQVADLSEIPRCNCKPADENPCGLESECLNRMLQYECHPQVCPAGDRCQNQCFTKRLYPDAEIIKTERRGWGLRTKRSIKKGEFVNEYVGELIDEEECRLRIKRAHENSVTNFYMLTVTKDRIIDAGPKGNYSRFMNHSCNPNCETQKWTVNGDVRVGLFALCDIPAGMELTFNYNLDCLGNGRTECHCGADNCSGFLGVRPKSACASTNEEKAKNAKLKQKRRKIKTEPKQMHEDYCFQCGDGGELVMCDKKDCPKAYHLLCLNLTQPPYGKWECPWHQCDECSSAAVSFCEFCPHSFCKDHEKGALVPSALEGRLCCSEHDPMAPVSPEYWSKIKCKWESQDHGEEVKE

SEQ ID NO: 488 - DNA, 2903 bp, Human
ctcaattcgtcaccaggaggaagacggagctggctgcccagcccaaaggcccatgaggggatgcagttatgggctctgtcgccgtggattgttattttgtgtcagtaagtaatccataaagtgccaacatgggaaagaaacggacaaagggaaaaactgttccaatcgatgattcctctgaaactttagaacctgtgtgcagacacattagaaaaggattggaacaaggtaatttgaaaaaggctttagtgaatgtggaatggaatatctgccaagactgtaagactgacaataaagtgaaagataaagctgaagaagaaacagaagaaaagccttcagtttggctgtgtcttaaatgtggccatcagggctgtggcagaaattctcaggagcagcatgccttgaagcactatctgacgccaagatctgaacctcactgtctggttcttagtttggacaactggagtgtatggtgttacgtatgtgataatgaggtccagtattgtagttcaaaccagttgggtcaagtggttgattatgtcagaaaacaagccagcattacaactccaaagccagcagagaaagataatggaaatattgaacttgaaaataaaaaattagaaaaagagagtaagaatgaacaagagagagaaaagaaggaaaacatggctaaagagaatcctcccatgaattctccttgccaaataaccgtgaaaggactcagtaatttgggaaacacatgtttcttcaatgcagttatgcagaacttgtcacaaacaccagtgcttagagaactactaaaagaagtgaaaatgtctggaacaattgtaaaaattgaaccacctgatttggcattaacagaaccattagaaataaaccttgagcctccaggccctcttactttagccatgagccagtttcttaatgagatgcaagagaccaaaaagggggttgtgacaccgaaagaactcttttctcaggtctgtaaaaaagcagtgcggtttaaaggctatcagcagcaagacagccaggagctgcttcgctacttattggatgggatgagagcagaagaacaccaaagagtgagtaaaggaatacttaaagcatttggtaattctactgaaaagttggatgaagaactaaaaaataaagttaaagattatgagaagaaaaaatcaatgccaagttttgttgaccgcatctttggtggtgaactaactagtatgatcatgtgtgatcaatgcagaactgtctccttggttcatgaatctttccttgatttgtccctcccagttttagatgatcagagtggtaagaaaagtgtaaatgataaaaatctgaaaaagacagtggaggatgaagatcaagatagtgaggaagaaaaagataacgacagttacataaaagagagaagtgatattccttctggaacaagtaagcacttacagaaaaaagcaaagaaacaagccaaaaagcaagccaagaaccaacgaagacaacaaaaaattcaaggaaaagttcttcatttaaatgatatttgtactattgaccatcctgaagacagtgaatatgaagctgaaatgtcacttcaaggagaagtaaatattaaatccaaccatatttcacaagagggtgttatgcataaagaatattgtgtcaaccagaaagatttgaatggccaagcaaaaatgatcgaaagtgtaactgacaatcaaaaatccacagaggaagtagatatgaaaaatatcaacatggataatgatctggaggttttaacatcttctcccactaggaatttaaatggtgcctacctaacggaagggagcaatggagaagtggacatttccaatggtttcaaaaacctaaatttgaatgctgctcttcatcctgatgaaataaatatagagattctgaatgatagtcatactcctggaacaaaggtgtatgaggttgtaaatgaagatccagaaactgctttctgtactcttgcaaacagggaagttttcaatactgatgagtgttcaatccaacattgtttatatcagttcacccgtaatgagaaacttcgagatgcgaataaactgctttgtgaagtatgcacacggagacagtgtaatggaccaaaggcaaatataaaaggtgaaaggaagcatgtttacaccaatgccaaaaagcagatgctaatttctcttgctcctcctgttcttactcttcatttaaagagatttcagcaggctggttttaacctacgcaaagttaacaaacacataaagtttccggaaatcttagatttggctcctttttgcacccttaaatgtaagaatgttgcagaagaaaatacaagggtactctattccttatatggagttgttgaacacagtggtactatgaggtcggggcattacactgcctatgccaaggcaagaaccgcaaatagtcatctctctaatcttgttcttcacggtgatattccacaagattttgaaatggaatcaaaagggcagtggtttcacatcagcgacacacatgtgcaagctgtgcctacaactaaagtactaaactcacaagcgtacctcctattttatgagagaatactgtaataatatcaaaagcactttttctggaaacacatttatggcttttataatggctgaaataacgataaaaaaagactaattaaaatcatgttcacttaacattaaatacatgccagaagaaatcatgtttatttaaatattgaagggaaaaatacctaaaaatgtacaaaggttttatattgtcatagtggtttttattcctgctttgtttctggaaaggaaatcctgaattacttaagtactttgtgtttaatatatctgggtgatggatcacaacacatcaataaactgacttaccctaaaatc

SEQ ID NO: 489 - protein, 823 aa, Human
MGKKRTKGKTVPIDDSSETLEPVCRHIRKGLEQGNLKKALVNVEWNICQDCKTDNKVKDKAEEETEEKPSVWLCLKCGHQGCGRNSQEQHALKHYLTPRSEPHCLVLSLDNWSVWCYVCDNEVQYCSSNQLGQVVDYVRKQASITTPKPAEKDNGNIELENKKLEKESKNEQEREKKENMAKENPPMNSPCQITVKGLSNLGNTCFFNAVMQNLSQTPVLRELLKEVKMSGTIVKIEPPDLALTEPLEINLEPPGPLTLAMSQFLNEMQETKKGVVTPKELFSQVCKKAVRFKGYQQQDSQELLRYLLDGMRAEEHQRVSKGILKAFGNSTEKLDEELKNKVKDYEKKKSMPSFVDRIFGGELTSMIMCDQCRTVSLVHESFLDLSLPVLDDQSGKKSVNDKNLKKTVEDEDQDSEEEKDNDSYIKERSDIPSGTSKHLQKKAKKQAKKQAKNQRRQQKIQGKVLHLNDICTIDHPEDSEYEAEMSLQGEVNIKSNHISQEGVMHKEYCVNQKDLNGQAKMIESVTDNQKSTEEVDMKNINMDNDLEVLTSSPTRNLNGAYLTEGSNGEVDISNGFKNLNLNAALHPDEINIEILNDSHTPGTKVYEVVNEDPETAFCTLANREVFNTDECSIQHCLYQFTRNEKLRDANKLLCEVCTRRQCNGPKANIKGERKHVYTNAKKQMLISLAPPVLTLHLKRFQQAGFNLRKVNKHIKFPEILDLAPFCTLKCKNVAEENTRVLYSLYGVVEHSGTMRSGHYTAYAKARTANSHLSNLVLHGDIPQDFEMESKGQWFHISDTHVQAVPTTKVLNSQAYLLFYERIL

SEQ ID NO: 490 - DNA, 1881 bp, Human
gcgcttttcactgacaggcgctgttccccacagccagcgccgcccgccacgtcccagctctcggccaacggagctgcgcggcgggtgacctttccgagcccagcgcgatgacggctccttgctcccagccggcgcagcttcctggacgccgccagctcgggctggtgccgttcccgccgccgccgccgcggacgccgctgctgtggctgctgctgctgctgctggccgccgtggcgccggcgcgcggctgggagagcggagacctggagttgtttgacttagtggaggaggtgcagctcaacttctaccagttcctcggggtgcagcaggatgcatcatctgcagacatcagaaaagcatatcgtaagctttcactaactttacatccagacaagaataaagatgaaaatgcagaaactcagtttagacaattggtggccatttatgaagttttaaaggatgatgaacgaaggcagaggtatgatgatattctgatcaatggacttccagattggcgacagcctgtattctactacaggcgggtgagaaaaatgagcaatgctgagctggcattactcttgttcattattctcacagtgggtcattatgctgtggtttggtcaatctacctggaaaaacaactggatgaactactaagtagaaaaaagagagaaaagaaaaaaaagactggcagcaagagtgtggatgtatcaaaactcggtgcttcagaaaaaaatgaaagattgctgatgaaaccacagtggcatgatttgcttccatgcaaactggggatttggttttgccttacactaaaagcattacctcacctcatccaggatgctgggcagttttatgctaaatataaagaaacaagattgaaggaaaaggaagatgcactgactagaactgaacttgaaacacttcaaaaacagaagaaagttaaaaaaccaaaacctgaatttcctgtatacacacctttagaaactacatatattcagtcttatgatcatggaacttccatagaagaaattgaggaacaaatggatgattggttggaaaacaggaaccgaacacagaaaaaacaggcacctgaatggacagaagaggacctcagccaactgacaagaagtatggttaagttcccaggagggactccaggtcgatgggaaaagattgcccacgaattgggtcgatctgtgacagatgtgacaaccaaagccaagcaactgaaggattcagtgacctgctccccaggaatggttagactctccgaactcaaatcgacagttcagaattccaggcccatcaaaacggccaccaccttgcccgatgacatgatcacccagcgagaggacgcagagggggtggcagcggaggaggagcaggagggagactccggtgagcaggagaccggggccactgatgcccggcctcggaggcggaagccagccaggctgctggaggctacagcgaagccggagccagaggagaagtccagagccaagcggcagaaggactttgacatagcagaacaaaacgagtccagcgacgaggagagcctgagaaaagagagagctcggtctgcagaggagccgtggactcaaaatcaacagaaacttctggaactggcgttgcagcagtacccaaggggatcctctgaccgctgggacaaaatagccagatgtgtcccgtccaagagcaaggaagactgtatcgctaggtacaagttgctggttgaactggtccaaaagaaaaaacaagctaaaagctgaatattctgggagatgatgttcaccttcattttccaaaatgaatatcttaaaaatcttatgcagaaatttgcattttgtacctcaatatttctacgtcatgtgccttagt

SEQ ID NO: 491 - protein, 554 aa, Human
MTAPCSQPAQLPGRRQLGLVPFPPPPPRTPLLWLLLLLLAAVAPARGWESGDLELFDLVEEVQLNFYQFLGVQQDASSADIRKAYRKLSLTLHPDKNKDENAETQFRQLVAIYEVLKDDERRQRYDDILINGLPDWRQPVFYYRRVRKMSNAELALLLFIILTVGHYAVVWSIYLEKQLDELLSRKKREKKKKTGSKSVDVSKLGASEKNERLLMKPQWHDLLPCKLGIWFCLTLKALPHLIQDAGQFYAKYKETRLKEKEDALTRTELETLQKQKKVKKPKPEFPVYTPLETTYIQSYDHGTSIEEIEEQMDDWLENRNRTQKKQAPEWTEEDLSQLTRSMVKFPGGTPGRWEKIAHELGRSVTDVTTKAKQLKDSVTCSPGMVRLSELKSTVQNSRPIKTATTLPDDMITQREDAEGVAAEEEQEGDSGEQETGATDARPRRRKPARLLEATAKPEPEEKSRAKRQKDFDIAEQNESSDEESLRKERARSAEEPWTQNQQKLLELALQQYPRGSSDRWDKIARCVPSKSKEDCIARYKLLVELVQKKKQAKS

SEQ ID NO: 492 - DNA, 7045 bp, Human
ttgtatcttactgcaagatttatgaatgttatggaaagcaggactatataccctgaggttgaagccagctaactaaacctcgagtaacatgcatcaccaaagagtgatgatcatagacagttgtggcaaatgacttgaaagatccttagcttcactttgtcagaagggtcaacttgtattgaaaaagcaccctgcgatataattcatgaagttgctgtcactctaaattggtccttccttctggttagcaggagctattgtgacaatcttggttaccatccattaagtgctgctgattttggaaagatcatgaataaacgtctttccaaacatgaaggcacgtcgtttgggcacaagaggcaaatctaaatattgctacagtggactaagaaaaaaagcttttgttcatatgccaacactgcccaaccttgactttcacaaaactggagatgggttggaaggagctgaaccttctgggcagcttcaaaatattgatgaagaagttatctcttctgcttgccgtcttgtgtgtgagtgggcccagaaagtgttaagccaaccatttgacaccgtcttggaattagcccgcttccttgtaaaaagtcactatataggcaccaagtcaatggcagctctaactgtaatggcagcagcaccagcaggaatgaaaggaattacccagccttctgcttttatacctacagctgaaagtaattcctttcagcctcaggtgaagactttgccatctccaattgatgctaaacagcagttgcaacggaaaatccagaagaagcagcaagaacagaaactacaatcccctttgccaggagaatctgcagcaaaaaagtcagaaagtgctacaagcaatggagtgactaatcttcctaatggaaatccttcaatcctttctcctcaacctattggtatcgttgtggcagctgtccctagtcccattccggtccagcggactaggcaattggtaacttcaccgagtccaatgagttcttctgacggcaaagttcttcccctcaatgtacaggtggtcactcagcacatgcagtctgtgaaacaggcaccaaagactccccagaacgttccagccagtcctggtggggatcgttctgcccggcaccgttaccctcagatcttacccaaaccagcgaacaccagtgcactcaccattcgctctccaactactgtcctctttactagtagtcccatcaaaactgctgttgtacccgcttcacacatgagttctctaaatgtggtgaaaatgacaacaatatccctcacacccagcaacagtaacacccctcttaaacattctgcctcagtcagcagtgctacaggaacaacagaagaatcaaggagtgttccacagatcaagaatggttctgtcgtgtcgcttcagtctcctgggtccaggagcagcagtgcggggggaacatctgctgtggaagtcaaagtggaacccgaaacatcatcagatgagcatcctgtacagtgccaagagaactctgatgaggctaaagctccccagacacctagtgcccttttggggcagaaaagtaatacagacggagcactgcagaaaccttcaaatgaaggtgtcattgaaataaaagcaactaaggtctgtgaccagaggaccaaatgtaaaagtcgctgtaatgaaatgctgccaggcacgtcaacaggcaataatcaaagcactatcactctatcagttgcttctcagaacttaactttcaccagcagcagctcaccacctaatggtgactcaatcaataaagaccctaaattatgcactaaaagcccaagaaaacgactgtcttctacattgcaagagacccaggtgcctcctgtaaagaaaccaattgtggaacagctttcagcagctaccatagaagggcagaaacaaggcagtgttaagaaggaccaaaaggttccacattcagggaaaacagaaggttcaacagcaggtgctcagattcctagcaaggtatcagtaaatgtcagttcacacataggagcgaatcaacccttgaattcctctgcccttgttatcagtgattcagctttggaacagcaaacaacccccatcatcatctccagatataaaagtaaaacttgaaggaagtgtctttctcttggacagtgattcaaagtcagttggcagctttaatccaaatggatggcaacaaatcactaaagattctgagtttatatctgccagttgtgaacaacagcaagatatcagtgttatgacaattcctgagcactctgatatcaatgacttagagaaatctgtttgggaattagaaggaatgccacaggacacatatagccagcagctacatagccagatacaggaatcttctttaaatcaaatacaagcacattcttcagatcagttacctctgcaatctgaactgaaggagtttgagccttctgtttcccagacaaatgaaagctactttccttttgatgatgaacttacacaagatagtattgtggaagagctggtgcttatggagcagcaaatgtcaatgaacaattctcattcttacggcaactgtttgggaatgacccttcagagtcagtcagtaactccaggagctccaatgtcatctcacacttccagcacccacttctatcatccaatccacagcaatggcactccaatccacacacccacacccacacccacacccactcctactccaaccccaaccccaaccccgacatctgaaatgattgctggatctcagagtctgtcacgggagagcccttgctccaggctagcccagactacacctgtggatagtgctttaggaagtagccgacatacacccattggtactccacattctaactgcagcagtagtgtcccccccagccctgttgaatgcaggaatccgtttgcattcactccaataagctccagtatggcatatcatgacgccagcattgtctcaagtagtcctgtgaaaccgatgcaaagacccatggccacacaccctgacaaaaccaagcttgaatggatgaataatgggtatagtggggttggtaattcatcagtttctggccatggtattctcccaagctatcaggaactagtggaagaccgtttcaggaaacctcatgcttttgctgtgcctggacagtcttatcagtctcaatccagacatcatgacactcattttggtcgtttgactcctgtctctcctgtgcagcatcaaggtgccactgtaaataacaccaacaaacaggagggttttgcagtccctgcccctcttgataataaaggaactaattcatctgccagcagcaacttcagatgccggagtgtgagccctgctgttcatcgccaacgtaatcttagtggaagcaccctctatccagtatctaatatcccacgatctaatgtgaccccctttggaagtccagttaccccagaagttcatgttttcacaaatgttcacacagacgcatgtgccaacaacatagctcaaagaagccaatcagttccattgacagtcatgatgcagacagccttcccaaacgctcttcagaagcaagcaaacagtaaaaaaataaccaatgttttgttgagtaaacttgattccgacaatgatgatgcagtgagaggtttgggaatgaacaacctgccctctaattatacagcccggatgaatctcactcagatttggaaccttccactgtttttcctagtgccaacccacaaaatatgatcgattccagcacttctgtttatgagttccaaacaccatcttacctcaccaaaagtaatagcaccggtcagatcaatttttctcctggagataatcaagcacaatcagaaattggagagcaacaattagatttcaatagcactgttaaagacctgttgagtggagacagcttgcaaaccaaccagcagctggtaggtcagggagcatctgatctcactaatactgcatctgatttctctagcgatatcaggttgtcttctgagctctcaggcagcatcaatgatttgaacactttagacccaaatctactgtttgatccaggtcgtcagcagggacaagatgatgaagctacactggaagaattaaagaatgacccattatttcaacaaatttgcagtgaatccatgaattctatgacttcatcaggttttgaatggatagaaagcaaggaccatcctactgttgaaatgttgggttaaattgtgttttataacatgtagcacactgtatctaaagacatatgtattgtatttgtcttaatggaagtgcctcccgcagcagaaatactattaattgtgacattttaaaagcgtttgctgcagaagtggtttcttcagtaggaaatggttagacttgcctcagttcttaacaagtgtctaaagacagtaggctgtagaagaacaagtattaggttttaaattttataatgtgccccatttattcacattgattgactatccagctgttacaagagcagtcgatctttattttgtgtaagttagtttcatttcatcagatgatctgcacagaactcagaataaaccatcaattttaggtataggctgttttgttgttggcattatcttttagatataaaatcatagctagggtgaactgtagacaagaaagtcttccttgaaacagggataatattcaggttattataaatatttaggcttgaagcatagagctactgtagggtgaaaaatctctgtaggactttctggggcttcagtaccatttacacccacgatgaagggcttaaatagaaaataatggaaaattaaatattactttaaggaaagcaaagctgcactaaaatttttaagggaaaaaaaacaagtagccatttatatttgtgaccttgcattaatatttaaatgttgattttaatatggagctagcacacatagatgcgcaggcacgcacacacaaaacaagcaaatgtaactccaggcatttgtaatttaatataataaatacaagcatgttagaaaaatgctttatgtcttattatttgttaagttaggggaatgagaaggaaaacaaaagcattctcttagtttcatcacaatggctgcatgtacatattgagattctaattgagatttactttgaaatttttcattaaaatattccacaataatcagtttttttcctcttcaattgagtgactgactccctcactcctcctgaatatagtaatgtagtttgatcataggatccctttgaaaaacaggaaggaggataacataaaaaacaacaaaaaacatttcaccacctaaggtctgaagccacaaatctttatatctctgatgaaacaaaggggatatcaatagtacttgaagaagaagagcattttattacttgcttaatttatttattgtgataaccacaattgcaaaagaagaactcaggatttgttttaaaatgtttctctctatggctcccattttgttttgtgaataattatttatgagttgcatgttgacacaaacctactcactggttgaaagctccatttaagtgagtttcaagatcactttcaaagagatttttaaattgccattgtttttaaagctaacataaaaccatttgctatgctaccttgaacctagctaagctttcctttaccttagtaagccaatcagaagactacaatcaatgaatatttagcaaatgtgctgaagggtttaataaggttttgttgttcaataaatttgcaaggtagggtattaacatattttgataaataaatggtgctagagttggcgcagaggtttatatattgatatgtcttagttattggcatttgtgtgtgtttgctgttatcttgatttcatgatttgttaggtatttttttcttgatgctagttatttcttcactgtacattgagacacagcactactgcacaccaaagtatgcaatacccaaaggaaactgtgtgatttctcctgacaaatgatgggagcctttctttatgagatactctgaaaaggagattttgaggccattctaatcccttgtttacattattagcttcctactaatataaaaataatggaaatcttttttgataaaaatattaagactggaggatttttaaccccttgtacagtattgcagcaaactctttaaatttggttgaattcgtccagcaaactttctggggttcatatattgcactaaatttgttgaacctgtggtaggcacatctcttaggataaatgcaaccaatacagtccacagattaaactttttaaatgtgtttcattatgaaaagacaaaatgtcatcaaagtgacagataaaattgtcttatgtagcaatgtgcattgatctcaatgagatatttctattattctcttacatgagaatattacagcaggaagaattaagtttagtttgcttcaccatgttaatacatgatcacaaaatgtgcatgagtgttattgacttatcttgtacagtactaggattcctgtaaccactcttttttttcttcgctgtattgaaactggttcagtgttaaccaggcaagcatagttattcacaggttatttactttatgtttactaattctgcttagttattgttgaatatgttctgttccagattatttttattgttttgatgtttaaaacattttgcatactgtttatcataaaacttcatgaagtaaataattttgcatataattgcaataagcactgacttttgaactgaaaagaaggaaagtgtttttttgtgcagtgcttctgaggttcatataatagtcttgtactataatgtgctttactacacgataaatgacaaaaacaagccctgtttcatgtttcatttagtgcaaaaagtcagatttccccagtgttttgttgtctgttgtacctgctgaaactacagtagttgaatattgcggtagcatttcagttctctttttttattaaagtgctcaaaaattgttttttaaatgttttcaaaaacaattaaaaacattttatattaaactg

SEQ ID NO: 493 - DNA, 3384 bp, Human
gcttctaaacaacctaccctccttccccattttctgtggtccaactaccctcggcgatcccaggcttggcggggcaccgcctggcctctcccgttcctttaggctgccgccgctgcctgccgccatggcagagttgggcctaaatgagcaccatcaaaatgaagttattaattatatgcgttttgctcgttcaaagagaggcttgagactcaaaactgtagattcctgcttccaagacctcaaggagagcaggctggtggaggacaccttcaccatagatgaagtctctgaagtcctcaatggattacaagctgtggttcatagtgaggtggaatctgagctcatcaacactgcctataccaatgtgttacttctgcgacagctgtttgcacaagctgagaagtggtatcttaagctacagacagacatctctgaacttgaaaaccgagaattattagaacaagttgcagaatttgaaaaagcagagattacatcttcaaacaaaaagcccatcttagatgtcacaaagccaaaacttgctccacttaatgaaggtggaacagcagaactcctaaacaaggaaattttaagacttcaagaagagaatgagaaattgaagtcaaggttgaagaccattgaaatacaggctacaaatgcactggatgaaaagtcaaaactagaaaaagcactgcaagatttacagcttgatcaaggaaatcaaaaggattttataaaggcccaagacttaagtaacttagaaaacactgtcgctgccttaaagagtgagtttcagaagacacttaatgacaagacagaaaaccagaagtcactggaggagaatctggcgacagccaagcacgatctactcagggttcaggagcagctgcacatggctgaaaaggaattagaaaagaaatttcagcaaacagcagcttatcgaaacatgaaagagattcttaccaagaagaatgaccaaatcaaagatctgaggaaaagactggcacaatatgaacctgaagattaaaactgaagatttcctctggaagctaccacatgcaaacatacaagcagtctcacctcaggcatgtattttgaaaagcattttgtcatatcccctctccttatttttctaatatttagactttgaatatttagaactagagttcctattttcagctagttgaaaacagagaaaacctagtgattctgtctggtcatcccacacacctctctactgagtgctccagagtcttagctcacatgcactgagaattctttacagcaaagaagagatttttagagtgggaagaagaggcttatccttctgcattagtataaagagtctgtatttttaataaatgttaaataagctaacaatgtttgtacttatgcattccccatgggtaaaaataaataatagcattgttaaagatagttattaccaaaaaaagagagttattacaaataaatatgtctctttatttttaaaaatgaaatcttaattcatttactctatttgatgataaactataaattcattgaaaatgtgaattctattatgggtagcctttttaccaattataaggaaaatttacagcagtgaacatgaacattcacttagcttcctcagtctctccatcttaaagatcatttatcagaggaggttcagcattttttgcagcataacttttcatgagtctgtattactaatggataagtcaaatccatcctgcacttctacagtttagaaagtatctggactcagaataaatgtaatatttatacttgtttccagaatgttattttacattttatgttcaataagaacactttttaaaagacgtatattcaacataaaatcagctatcagacttcagattagactttatttatgtgggtctataataattgtattttcaagaggttttcactatatttgtattggcctggttttctcagacgattttggacaaatcattagaaactgggcatcatatccacagttatgtaaggcagtgatatactataaggataaacaaagtcaagtccataaagcaataatccctcagaaggaaagtccttacttttcacatattaatatttagtaatttttcctgcttctaaaagtgagagtatcacaccctaaatgaacactgtctactaagagacatcattccatttccacaaatgaagattttattccaagaaacgagtttactgattggagcatagggcttgttgttatttttattcaagcttttagtaatagccttgaatttattatttttcttataggctttttgttaaaatagtgaaggaacaaatgttaaagggtaagataatttccctgcaaaaggacacagaaggcagtcttaagaagatgaatggatgagagaagggagagaataaaatgcaataacgagccagcatttactatgtattttctcctcacctgtctctccatatttaggtcacttaccagtttctgtgcccttttggagcttttgttgagggcttcattctcaccctgtatttctttagccctaaattgacactctctccaaaaatccattccattgtctgtggaccaagatgttctatgtaattcagaagcagaactcttggctaaagggctagtgtggccttcagaaaccattcaattattttctccctacacctttgtcagtttgaaaccagtgaggaaaaaaggtatgttgataagaaacctatattgctaggtagaatttgtacttgttttcttggtagcagttttgaaatattctgtacagtacgttcctattgtttaataataaattcaaaaatatttctaaaaccttaaaaccaactatgccaagcattaagataaacaaatatgatgttctttgacgtaaatcaacgtgatgattctttcacatgtaaacacattttagtgtttctggtttgtcatttttgttgttgttgttgttgttgttatttactctataccctttagcaaaatacagttttaaatttttattgtttttagtagtttcccaactttaagacttatctaatttaactgagaaagaaagcctttttcatatatatatatattggatttctaaggatggtggtttgagccttgattagacttttgatgtgctaagccagacaggcagtctgtacattgatggccatcacaatgcagctttggtttaatttaattcaggcctgctgctgagttatgcacagactttttgttgaccaaaataaaatataaagggttttcttctgtttgacatttgtgttcattttttctctttatgtattacattttaacctatattaaataaatgtttaaatgataatttgcttatgtcttataaaactcagcataagaaaaat

SEQ ID NO: 494 - protein, 299 aa, Human
MAELGLNEHHQNEVINYMRFARSKRGLRLKTVDSCFQDLKESRLVEDTFTIDEVSEVLNGLQAVVHSEVESELINTAYTNVLLLRQLFAQAEKWYLKLQTDISELENRELLEQVAEFEKAEITSSNKKPILDVTKPKLAPLNEGGTAELLNKEILRLQEENEKLKSRLKTIEIQATNALDEKSKLEKALQDLQLDQGNQKDFIKAQDLSNLENTVAALKSEFQKTLNDKTENQKSLEENLATAKHDLLRVQEQLHMAEKELEKKFQQTAAYRNMKEILTKKNDQIKDLRKRLAQYEPED

SEQ ID NO: 495 - DNA, 3593 bp, Human
acgcgtggcgcgatggcggcggccccacgcgcgggccggcggcgcgggcagccgctcctggcgctgctgcttctgctgctggcgccactgccgccgggggccccgccgggcgccgacgcctactttcccgaggagcgctggagcccggagtcgcccctgcaggcgccgcgcgtgctcatcgcgctgttggcgcgaaacgcggcccacgcgttgcccaccacgctgggcgcactcgagcggctgcggcacccgcgggagcgcacggcgctatgggtggctacggaccacaacatggataacacgtcaactgtgctgcgggagtggctggtggccgtgaagagtttgtaccattccgtggagtggcggccagcagaggagcccaggtcctacccggacgaggaaggcccgaaacactggtctgactcacgctacgagcatgtcatgaagttgcgccaggcagccctgaaatcagctcgagacatgtgggctgattacatcctgtttgtagatgcggacaacctgatcctcaaccctgacacactgagcctgctcatcgctgagaacaagacggtggtcgcccccatgctggattcccgggctgcgtactccaacttctggtgtggaatgacttcccagggctactacaagcgcacacctgcctacatccctatccgcaagcgagaccgccggggctgctttgcagttcccatggtgcactcgaccttcctgatcgacctgcggaaggcggcgtccaggaacctggccttctacccacctcaccctgactacacctggtcctttgacgacatcatcgtctttgccttctcctgcaagcaggcagaggttcagatgtatgtgtgcaacaaggaggagtacggattcttgccagtgccattgcgcgcccacagcaccctccaggatgaggccgagagcttcatgcatgtgcagctggaggtcatggtgaagcacccgcccgcagagccctcccgcttcatctcggctcccaccaagacaccggacaagatgggcttcgacgaggtcttcatgatcaacctgaggcggcggcaggaccggcgggagcgcatgctgcgggcgctgcaggcacaggagatcgagtgccggctggtggaggccgtggacggcaaagccatgaacaccagccaggtggaggcgctggggatccagatgctgcctggctaccgggacccctaccacggccggcccctcaccaagggtgagctgggctgcttcctgagccactacaacatctggaaggaggtggtggaccgggggctgcagaaatcgcttgtgtttgaggatgacctgcgttttgagatcttcttcaagagacgtctgatgaacctcatgcgggatgtggagcgggagggcctggactgggacctcatctatgtgggccggaagcggatgcaggtggagcaccccgagaaggctgtgcctcgcgtgaggaacctggtggaggccgactattcctactggaccctggcctacgtgatctccctgcaaggcgcccgcaaactgctggctgctgagccgctctccaagatgctgcctgtggacgagttcctgcccgtcatgttcgacaaacacccagtgtccgagtacaaggcccacttctccctccgcaacctgcatgccttctctgtggagccgctgctcatctaccccacacactacacaggagacgatggctatgtgagtgacaccgagacctcagtcgtatggaacaatgagcacgtcaagaccgactgggaccgcgccaagtcccagaagatgcgggagcagcaggcactgagccgtgaggccaagaactcggacgtgctccagtccccactggacagtgctgcccgggatgaactctgaggggtagcagccagaaagccaaagcagccatcggtggcccaggctccacgtgcttactgaggacatcagggccacctctggaccccttggcaggccacagagggctctcgtgtggggtggtgtccagccagctcttgctaagcaatcacgtgcacacaggcagcattaatggagtgcctactgcatgccagcaacagggcttggccctggggaattgggaggaaccaagccctcttcatctgttcatgtgcccagcatttattaagcacctgctgtatgcaaggttcccatgttacggcagtgaatgaggcataattgttccctccatcagcgattgattcagtcatcaagcagttactgatcagattaagaatcaggcactagtgatacacattcatttttaaaattcattcaaggatttattgagtgcctactgtgtgttgggtgccattccaggctctgggatttttttttttttttttttaagagtagagtctgtctctgtcacccaggctggagtgcagtggtgtgacggctcactgcagcctgcgcctcccagcgtccagcaattcttgtttctcggcctcccaagtagctgggactataggtgcgtgccatcacatctggctagtttttgtatttttagtagagacggggtttcaccatgttggccagactggtctcgaactcctgacctcaagtgatctgcccgccttggccacccaaagtgctagggttacaggcatgagccactgtgcccagcccaggctctgggaatattgagataaataagatgcttctatccatttattcaagcacatattggtcacctactgtgtgcctggcactcatgtcacaaagataagttcctgattcggtacacttactgagcacctgctgtgtgcagggagctgagctatgggatgggaatgggagtaaacaaggtacttttcacttttttctttttttcctcactgctagacggtgtgggaacttctcactcattggcttctttcccacacacctgaagagcactgactgtgtgccgggcactagtgatacaaaagagtgtgacagttgttcagtctgcattttcgatcatgggctacatgccgagtgctggggcacagagatgaacaagatcggttccttcacttcttcatgccacaagtgtttattgagcacctgtgtgccaggcctcacagactcccagttgggttgaagaatggttgactgagtttgattcttcctgtaccctcggtcgtctgagctgtgtgcggacaacatccccccaccacccaagagggagggtagctcttccgccaccaggggcaagcacaggtcctggtggccccacgccacatgttagcccccctggagggggcgccagttggagacgggggctgggtgtccctggcccactcccagtcccctgtgctttacctccttgcccttgtgtctcaggtgtggtccctgcctgcttgatgaagttgctctgttcaagcctttggtgggatcatgtgtttgggggcttttaggggacccagctgcactggggcactgcccgtggcctgggtaggacatttcccagcaagggctggaggagttgccgtgccttcagcctgaatcgaatgtcagaaccagccagcggtgcttcaccctcttggggataacttgcttagttttttaataaatgttcctggttggttttc

SEQ ID NO: 496 - protein, 622 aa, Human
MAAAPRAGRRRGQPLLALLLLLLAPLPPGAPPGADAYFPEERWSPESPLQAPRVLIALLARNAAHALPTTLGALERLRHPRERTALWVATDHNMDNTSTVLREWLVAVKSLYHSVEWRPAEEPRSYPDEEGPKHWSDSRYEHVMKLRQAALKSARDMWADYILFVDADNLILNPDTLSLLIAENKTVVAPMLDSRAAYSNFWCGMTSQGYYKRTPAYIPIRKRDRRGCFAVPMVHSTFLIDLRKAASRNLAFYPPHPDYTWSFDDIIVFAFSCKQAEVQMYVCNKEEYGFLPVPLRAHSTLQDEAESFMHVQLEVMVKHPPAEPSRFISAPTKTPDKMGFDEVFMINLRRRQDRRERMLRALQAQEIECRLVEAVDGKAMNTSQVEALGIQMLPGYRDPYHGRPLTKGELGCFLSHYNIWKEVVDRGLQKSLVFEDDLRFEIFFKRRLMNLMRDVEREGLDWDLIYVGRKRMQVEHPEKAVPRVRNLVEADYSYWTLAYVISLQGARKLLAAEPLSKMLPVDEFLPVMFDKHPVSEYKAHFSLRNLHAFSVEPLLIYPTHYTGDDGYVSDTETSVVWNNEHVKTDWDRAKSQKMREQQALSREAKNSDVLQSPLDSAARDEL

SEQ ID NO: 497 - DNA, 3378 bp, Human
acagctgcaccgccgagctgcgagcggctgcgagcgagagagcgtaagagcaagagagctagagagcgagcaacgggcactcgccccacgcctcccctcagccccaccgcgcgctccgcttgcctctccaccccgcccgactctacccggcccggtccctgcgcgggcacagcccagagctctggggcggtgcaggcagcctcgggactctccggcgcgccgccgcgtccccagacaaaggcttggccggcggccccggcccgctgcgccctcgctccccgcctccccagctcttctccgctcttcccccccgcgcttggctcggcgcgctccggccggccgcaaagtttcccgggcggcagcggcggctgcgcctcgcttcagcgatggccgcggagctgagcatggggccagagctgcccaccagcccgctggccatggagtatgtcaacgacttcgacctgctcaagttcgacgtgaagaaggagccactggggcgcgcggagcgtccgggcaggccctgcacacgcctgcagccagccggctcggtgtcctccacaccgctcagcactccgtgtagctccgtgccctcgtcgcccagcttcagcccgaccgaacagaagacacacctcgaggatctgtactggatggcgagcaactaccagcagatgaaccccgaggcgctcaacctgacgcccgaggacgcggtggaagcgctcatcggctcgcacccagtgccacagccgctgcaaagcttcgacagctttcgcggcgctcaccaccaccaccatcaccaccaccctcacccgcaccacgcgtacccgggcgccggcgtggcccacgacgagctgggcccgcacgctcacccgcaccatcaccatcatcaccaagcgtcgccgccgccgtccagcgccgctagcccggcgcaacagctgcccactagccaccccgggcccgggccgcacgcgacggcctcggcgacggcggcgggcggcaacggcagcgtggaggaccgcttctccgacgaccagctcgtgtccatgtccgtgcgcgagctgaaccgccacctgcggggcttcaccaaggacgaggtgatccgcctgaagcagaagcggcggaccctgaagaaccggggctacgcccagtcttgcaggtataaacgcgtccagcagaagcaccacctggagaatgagaagacgcagctcattcagcaggtggagcagcttaagcaggaggtgtcccggctggcccgcgagagagacgcctacaaggtcaagtgcgagaaactcgccaactccggcttcagggaggcgggctccaccagcgacagcccctcctctcccgagttctttctgtgagtcgtggccggtcctggcccccgcccttgccccggcccggactccctgtcccacgtccctagtcccagactaccccggaccctgtccctgccgcggccccagccttgacctgtttgacttgagcgagagggaggaagggcgcgcgggccgcgggcgacgggcgggtgcgcgggcgggcaggggaccttggctaaggcgagagtagcgcacgccagcgccgcctcctagactcgagcagagccggagagagagacgagagggtgggaggtcccggagtaacttctctccaggctgaagggcggcgaggcatagtcccgagaagtcaccaaggccatctggagactcctggctttctgaactttgcgcgttaagccgggacagctgctttgctgcccggagagtagtccgcgccaggaagagagcaacgaggaaaggagagggactctggcgtcccggcaggcgagaggcgaggctgagcgaaagaaggaaggacagacggacctgtctgtcagagttcggagaacactggctctcagccctgagacacaggcctcagttaggacgctcggcgcccaaatctcatcagttttattgcctgctcgattatatagaaaaatacaaaaaatctgcattaaaaatattaatcctgcatgctggacatgtatggtaataatttctattttgtaccattttcttgtttaactttagcatgttgttgatcatggatcatactccccttgtttctttgggtgagaagggatcgcagtttggaaactccggcggctgcgtgcggggtttcagtcccagctgtaggcttgtaaatacccgccccgccaaaccgcatagagaacgtggcagcaagctgagggtctttgtttgggtttattattacggtatttttgtttgtaagttaaaaagaaaaaaaaaaagaaaaagttccgggcattttgcatcagaaaacaactttgtcttggggcacacttggaagttgcatgttttctttccttcccttatccccattcggtcctctttttcctctctcgctttagttttcaaccttgttggtgctgagagagagaaccgagaggtcccagtacaagggcagggcagggcagggaagctgccaagctccgcaccccagaggagtgttctggactacagccttgtcttatggtcaaattgatacccttaataagaaaggaaaggaaaggaaaacagatcctcccctctgctttttattgtaaccagaatcaccctgaggtcccttctgaaccctctgggcctgcgctaattgtaggagccacagcgctcctagggtgagaggcttagccatccctgaccctggcagtgcactggtaagcagacactgcactgaaccaactgctatgctcagaatgtaccagaaacccaaacattggcaagtaattttgcaactttcaagtgcgttctttagaccaatgcattgcgtttctttccctgcttttgagatagtaggaagagttcttggtggtgtccccccccttcaattcttcagttgtatagtagttatagggaagatatgggtgtttttctttattattacttttttttttctgcaggtcagtaaaaggatttaagttgcactgacaaaaataccaaaataaaagtgtatttttaagttcccatttgaaattgctggcgctgctggccggatgcatttttgagtttgtattagttgataaattaacagtaataacaagattgtatgaaccgcatggtgcttgcagttttaaatattgtggatatttgtcctgcatcagaaacgagctttggtttttacagattcaactgtgttgaaatcaaacctgccgcaacagaaattgtttttatttcatgtaaaataagggatcaatttcaaaccctgcttatgatatgaaaatattaaaacctagtctattgtagttttattcagactggtttctgttttttggttattaaaatggtttcctattttgcttattaaaaaaaaaaaaaaaaaaaa

SEQ ID NO: 498 - DNA, 3192 bp, Human
attcgctgcggagccggaggaggaggggagaggcctggaggacaccaacatgaacaagttgaaatcatcgcagaaggataaagttcgtcagtttatgatcttcacacaatctagtgaaaaaacagcagtaagttgtctttctcaaaatgactggaagttagatgttgcaacagataattttttccaaaatcctgaactttatatacgagagagtgtaaaaggatcattggacaggaagaagttagaacagctgtacaatagatacaaagaccctcaagatgagaataaaattggaatagatggcatacagcagttctgtgatgacctggcactcgatccagccagcattagtgtgttgattattgcgtggaagttcagagcagcaacacagtgcgagttctccaaacaggagttcatggatggcatgacagaattaggatgtgacagcatagaaaaactaaaggcccagatacccaagatggaacaagaattgaaagaaccaggacgatttaaggatttttaccagtttacttttaattttgcaaagaatccaggacaaaaaggattagatctagaaatggccattgcctactggaacttagtgcttaatggaagatttaaattcttagacttatggaataaatttttgttggaacatcataaacgatcaataccaaaagacacttggaatcttcttttagacttcagtacgatgattgcagatgacatgtctaattatgatgaagaaggagcatggcctgttcttattgatgactttgtggaatttgcacgccctcaaattgctgggacaaaaagtacaacagtgtagcactaaaggaaccttctagaatgtacatagtctgtacaataaatacaacagaaaattgcacagtcaatttctgctggctggactgaactgaagatcaatcctcacaattcagactgagggttgagacaaaactttaaggatacatcttggaccatatcgtatttcattcttctaatggtggtttgggcttgtcttctagtctgggccgctctaaacatttataattccaacattgtggatttcatcttatatctgtggaccatcctagtttattctcccataagtcttagaagctttatggtgattattttgaggttttcattctcgcataaagcacaatgctgtcttcatcagaaaacagttggcataagaattaaacatatgaacatcacaaaacaatttataaaaacttcttaaatatacgctttgggctagttgcaaagactatgctaatagcacttccagtgagagtgatatatttaagtgtactggatctggaatggtgttttggtttggggggaattttttttttttcctggcaaatcacatgtgttgttgatgtgagtatctgatgaaaaaacaatgtcagaataaccgacatgaaaattttttaggataacttggtgcctacctgaaaaatgtattgtgttttagactcttgatttcaaaaggttccacagaactagtctgcgcttaccttacccatgtttatatatagctgtcctacagggagcttttatttagaaaatgtctgcataatgttagattcttctcctgtctacattatgcactacataattggacttcattatgcttttgaaatgcttatctgcctgtcacataagttaaactatttaatttgttttgaatgttttggattgctacacaatacaatattctaaatttaggcatgagggtttttttgttttgtttttactttttttttgtcatcgcactatggaacacaaatggaattctcttaatttataagaagatagttgcagttaaattttgaaaatggttgtaatgagccatgaagttcaatctttataatataggtactgctctttcagacaaatagtccattttcgatgacttattattttgttgaaattgctttaactgctaatcactgtggttgccaaatatttacttcaggagcaaagattttcaaacaagcatacacgatgcaaaataccaatctggcttctagtctctttactgttttcgtttcactcagattagctcagttttctcatcaaagcagaatgctatcttgtatgtatttttttcattacaagccccatgagctgcttttatgctgaaaatggtcatttccctgttcacttactgacatgtgaagaagggtttcttgctttcttaaacatttccgtaaggcaggctagaaatgtaatacttcaaatgtttgatgattatggtcttttgataggaatagattctgcttgggatatatatccaggcactctctaaggtctagggttgatattaacaaaggaatgtacttagaatagcagtacattttatgcaaatatggaaattattttaagaaacaatgacatatcaaaactgctttttacatgattttgaaatagactagaaagctttccctatagacatattaatattccaatcataactttaattcaagaatgcagttttaccaaaagaaaaatttgaaaatttctattcaggctactggaattggttattaaaagaaaaaggaaaaagaagaatcttgctgctttcagtatttcctgatttttttgtaaatataaagaggaacttcaattatgaaaaatttttaaaagatatatatatctatatatctatatatatgtactgttttgtttcctgtcttgaagattttgagttatggttattggtttcagattgattaattcacatatgctgtgttttgaaatgagatcccattagcttttttttttttttttttttttcaatataaagtgttttctttaaaagtcatattggttcgtggcctagtgccttggattttacatatttttctttttaaatgcaaaaccttttcaacaaaatagtgtttgtcatcaggttggtactaaacatttataattactgtgtaattataaacaaaaatacataaagctttgaatataattatgtagcataaaagttaaggttgttcactatgatggcatcttagaattaaacaaaacttttactagggctgaaaagagaagactgatttaatgtggtgtgattattctgaagataaatgtctggctacagggaatattttgtactaaaaaatgattacacaaaaaaaaaaaaaaaaaaaaaaaaaaaaaaaaaaaaaaaaa

SEQ ID NO: 499 - DNA, 3538 bp, Human
gggccatctttgtgcggggccgcgcttccgccagcgccgcagcggggaatctgcagtaggtctgccggcgatggagtggtgggctagctcgccgcttcggctctggctgctgttgttcctcctgccctcagcgcagggccgccagaaggagtcaggttcaaaatggaaagtatttattgaccaaattaacaggtctttggagaattacgaaccatgttcaagtcaaaactgcagctgctaccatggtgtcatagaagaggatctaactcctttccgaggaggcatctccaggaagatgatggcagaggtagtcagacggaagctagggacccactatcagatcactaagaacagactgtaccgggaaaatgactgcatgttcccctcaaggtgtagtggtgttgagcactttattttggaagtgatcgggcgtctccctgacatggagatggtgatcaatgtacgagattatcctcaggttcctaaatggatggagcctgccatcccagtcttctccttcagtaagacatcagagtaccatgatatcatgtatcctgcttggacattttgggaagggggacctgctgtttggccaatttatcctacaggtcttggacggtgggacctcttcagagaagatctggtaaggtcagcagcacagtggccatggaaaaagaaaaactctacagcatatttccgaggatcaaggacaagtccagaacgagatcctctcattcttctgtctcggaaaaacccaaaacttgttgatgcagaatacaccaaaaaccaggcctggaaatctatgaaagataccttaggaaagccagctgctaaggatgtccatcttgtggatcactgcaaatacaagtatctgtttaattttcgaggcgtagctgcaagtttccggtttaaacacctcttcctgtgtggctcacttgttttccatgttggtgatgagtggctagaattcttctatccacagctgaagccatgggttcactatatcccagtcaaaacagatctctccaatgtccaagagctgttacaatttgtaaaagcaaatgatgatgtagctcaagagattgctgaaaggggaagccagtttattaggaaccatttgcagatggatgacatcacctgttactgggagaacctcttgagtgaatactctaaattcctgtcttataatgtaacgagaaggaaaggttatgatcaaattattcccaaaatgttgaaaactgaactatagtagtcatcataggaccatagtcctctttgtggcaacagatctcagatatcctacggtgagaagcttaccataagcttggcacctataccttgaatatctgctatcaagccaaatacctggttttccttatcatgctgcacccagagcaactcttgagaaagatttaaaatgtgtctaatacactgatatgaagcagttcaactttttggatgaataaggaccagaaatcgtgagatgtggattttgaacccaactctacctttcattttcttaagaccaatcacagcttgtgcctcagatcatccacctgtgtgagtccatcactgtgaaattgactgtgtccatgtgatgatgccctttgtcccattatttggagcagaaaattcgtcatttggaagtagtacaactcattgctggaattgtgaaattattcaaggcgtgatctctgtcactttattttaatgtaggaaaccctatggggtttatgaaaaatacttggggatcattctctgaatggtctaaggaagcggtagccatgccatgcaatgatgtaggagttctcttttgtaaaaccataaactgtgttactcaggaggtttctataatgccacatagaaagaggccaattgcatgagtaattattgcaattggatttcaggttccctttttgtgccttcatgccctacttcttaatgcctctctaaagccaaaaaaaaaaaaaaagacaaagcctcttaataaatttaatggaactatacatagaacagcagctcttcctcaccctttgcatacctttaatatttttccttcttaaattggccacagcaggggtcattcacactctcactgtcttgcaggaatcacaagaagtcttcatatgtgaacgtgccattcagttggtagttaagagcattcaacttcaaatatatagaagatatttgttttagtgcaaatccatgatggagtgcctcccttttccttttttcactttttgaaaaagatgttttgggtagtagtttaatatctcagggtgctctttctaacatagtaaaaaatgaagaaaaatgtttagattaaaactctgtagtctgatgacttagaaccatccttgacccttaggcccaacctttccacagagaaatcacctctcttcctttgtcttttaagaactatttggtattaactagtttcagaattagtaaatgtgagattcagtcacataattatcagacattccatttgtcagaaatgtatttggctttttaaactcctttccacaaaagtttaagtctaatgaccttcttagagaagttgagcatgcctggcaagatcatttcatggaataagcagatgtttaaagttggatttttttttttttttttttttgagtactagcaatgcacagggaccgtgttcttaggttcttagtctgtgaatctagcaataggcagtccagatttctgagtcgtactatggttttgccttgtcactgtgaggccctactaggtgtaagcattctctctgaattttaatttcctctcattaaaataggaacaaaatttgctatcctttagattaggagctgaagattcatttccctgggaatgtttcccatttagcttcaagtttcagctcaaacatcaccttctttctgactcctttcattcattcctccaggcagtaaggggctaccatagtactttgtttatgcctgtattatatgacatcactgtagttgcttgactgtttctcctactgttctgtaaacttattaatgggtgagaatctaattttactcatcttgatggcttcatgatccagcacagtgcctcacacaaagaactattgggtgggtggatggatggatggaggaatggagacagttggcttaaccagatcctatatacagattattactggctccaaaggatgagtagataagaccataagaattggatcaatgtaaatcctcacctgccctttgaagagccaataagggcatctttgtctttaaatacagcaaatgttattcagattttgtacttgtctatctgtttacctcagtgtagatgatatgaggatggtataactatgtaaattgtttttgaaaataatttgtttccccacaacttttgaaggttttatttgttgttgttattactagttcagtcccaaacttaccctttccttttcagagagctaatggccatgcttttcttcaaggaaagaataatttatttgaatgaagtgggatacttgcataacacaaaaaaaaaaaaaaaaaaaaaa

SEQ ID NO: 500 - DNA, 2845 bp, Human
aaaaaagcgggacaggtccagcggttgttctgtgtgaagtcgcgcggcttccacccacgcagtgttctaagtgaaggccagaaactcgctcgccatgtcggctgcagaggcggggggtgttttccacagagccaggggcaggaccctggacgcgtttcccgcagaaaaggaaagcgaatggaaaggcccattctacttcatcctgggcgcagacccacagtttgggctgatcaaggcctggtccactggggactgtgacaatggcggcgacgaatgggaacaggagatccgtctaactgagcaagccgtccaggccatcaacgagctgaaccccaaacccaaattcttcgttctgtgcggcgacctcatccacgccatgccagggaagccgtggcggacggagcagacggaggacctgaagcgagtgcttagggcagtggacagggccatcccactggtccttgtcagcggcaaccatgacattggcaacacccccacggccgagaccgtcgaggagttctgccggacttggggagatgactacttcagcttctgggtcgggggcgtcctgttcctggtcctcaactcccagttctacgagaacccctccaaatgccccagcctgaagcaggctcaggaccagtggctggacgagcagctgagcatcgcgaggcagcggcactgccagcatgccatcgtcttccagcacatcccgctgttcctggagagcatcgacgaggacgacgactactacttcaacctcagcaagtccactcggaaggagttggcagacaagttcatccacgcaggtgtcagagtcgtgttctcaggccactaccacaggaatgccgggggtacctaccagaacctcgacatggtggtgtcatctgccattggatgccagctgggcagagacccccacgggctccgagtcgtggtggtcaccgccgagaaaattgttcaccgatactacagtctagatgagctgagtgagaaaggaatagaagacgatctcatggatttgatcaagaaaaaatgacgctccttcccgttcccgttcacttttcacttgcactatttttttattttgccagaaacagcagctgcacacaacctcttgctgaaatataaaaatagcccaggcaggtttgtgaatttatgtccttttgcataaatcagagagctggggccctgtcctgaattatattcaaaatagaactgcatttcctttaaaatggagcgaatgatcctggaaatcagtttttaaaatattagactatctctgcatggatgtttgaataaattctcctaatgctgtgtttctcaactccacttttgaattggattgtattctggttagcatatggtcaaagtctgcctatcgacctcaattccaatctgacagccaagtatgatctttgataattccttaaacaaactacacctgattgtattaaattgtggtcacgattcccaaaacgctaggcaaaacaaagttcatctcctttcctttccagcggaacgaacagctgtctgccttgttgtgagagccatgcagacttattttgacaaggagccaagtaggcaccatttactgttcaattctgagacttctgatgataggaacagaatgcagttgatacagctcggagcttaaatttgccttcctgggtgcctagaaaagtcacctttgcacataaattggccatttctgaaaatctcctccaagagactgaaaccaaagctctaaaacgccgcttcttcagtctctggggagcacgttgagttggttcacatccacattctggctgtgtagccactccacagatgggtggtctcttgggatcagaatgcccctccactcatgagactctccattttgtccactttgacaggaaaagtgggaatgtatgcagagctctcaaaagaaacaaaaaaggccaaaacggtgccttcagccacatcctctgaattggccctgacttggactaaatgcactaatgcgaaatcccttgacaaaagcgcataggttatttcaaaccagcattgttttttatgtaacctgttttaccgcatcttctcagcagcttctgaccactgctcaattttctcctttacagccattgttctggtggacaaataacctaggtactccaaatcctggcaggaaaaatatacagcattatgaaacagcactcagtaatcctaaaatgatttccaaagctggttacacatgacctgcaaagtctattaaattaaaagactttctcattacagagtttagtcaacgtagcaaaaccatgggaaattaaatggaaagataattaaatatgtaaattcataaggaacaaaagacgagaagttaattatacaataggctggtgacaccagagttcattgttatgtgccacaagaaaattaaattttttaaaaaactagaacgctcttcttttagtgttttgctgaaatcctgttttgtatttgtttctttacaacaggtgtaggtataggaggtcaagaaaaggagttcggtaaagggcatagctaataacaaccacacattgggccaggcgcagtggcttacgcctgtaatcccagcactttgggaggctgagacgggcagatcacctgagatcaggagtttgagaacagcctggccaacatggtgaaactccatctctactaaaaatacaaaaattagccaggcatgctggtgcacacctgtaatcccagctactcgggaggctgaggcaggagatcgctggaactcaggaggcagaggttgcagtgagccaagatcatgccactgcactccagcctgggcaacagagcaagactctgtctc

SEQ ID NO: 501 - protein, 314 aa, Human
MSAAEAGGVFHRARGRTLDAFPAEKESEWKGPFYFILGADPQFGLIKAWSTGDCDNGGDEWEQEIRLTEQAVQAINELNPKPKFFVLCGDLIHAMPGKPWRTEQTEDLKRVLRAVDRAIPLVLVSGNHDIGNTPTAETVEEFCRTWGDDYFSFWVGGVLFLVLNSQFYENPSKCPSLKQAQDQWLDEQLSIARQRHCQHAIVFQHIPLFLESIDEDDDYYFNLSKSTRKELADKFIHAGVRVVFSGHYHRNAGGTYQNLDMVVSSAIGCQLGRDPHGLRVVVVTAEKIVHRYYSLDELSEKGIEDDLMDLIKKK

SEQ ID NO: 502 - DNA, 2475 bp, Human
acgcctggtctctgggacgcccctccggacccgtttcgcctcgcggagccggtaggtccaggtgcagcggccgcagtgctgcgtccgtgcgccgcgggctggggcggtctcaggtgtgccgaagctctggtcagtgccatgatccggcaggagcgctccacatcctaccaggagctgagtgaggagttggtccaggtggttgagagctcagagctggcagacgagcaggacaaggagacggtcagagtccaaggtccgggtatcttaccaggcctggacagcgagtccgcctccagcagcatccgcttcagcaaggcctgcctgaagaacgtcttctcggtcctactcatcttcatctacctgctgctcatggctgtggccgtcttcctggtctaccggaccatcacagactttcgtgagaaactcaagcaccctgtcatgtctgtgtcttacaaggaagtggatcgctatgatgccccaggtattgccttgtaccccggtcaggcccagttgctcagctgtaagcaccattacgaggtcattcctcctctgacaagccctggccagccgggtgacatgaattgcaccacccagaggatcaactacacggaccccttctccaatcagactgtgaaatctgccctgattgtccaggggccccgggaagtgaaaaagcgggagctggtcttcctccagttccgcctgaacaagagtagtgaggacttcagcgccattgattacctcctcttctcttctttccaggagttcctgcaaagcccaaacagggtaggcttcatgcaggcctgtgagagtgcctgttccagctggaagttctctgggggcttccgcacctgggtcaagatgtcactggtaaagaccaaggaggaggatgggcgggaagcagtggagttccggcaggagacaagtgtggttaactacattgaccagaggccagctgccaaaaaaagtgctcaattgttttttgtggtctttgaatggaaagatcctttcatccagaaagtccaagatatagtcactgccaatccttggaacacaattgctcttctctgtggcgccttcttggcattatttaaagcagcagagtttgccaaactgagtataaaatggatgatcaaaattagaaagagataccttaaaagaagaggtcaggcaacgagccacataagctgaagtcacctcgcgttgtttagagaactgtccacatcaatgggagctgtcatcacttccactttgtaaacggagctatcaacaatcctgtactcacttgaagaaatggggccttgctgggaggaacagcatgtaaaactggaacttctaaccccgtcccaaaagaggcggtgtagagcctaatagaagagactaatggataaacctacaagttatttaaatatttaaattattaataaactttttaaagagctggccaatgacttttgaatagggtttgtagaagatgcctttcttcctgtttggttcattgtattgtattaggttaagctctactagggtaatgaaggctctacttttcactttttaaaagtggacaaaagagtgtgattttctttttccaaaaattcctgagtatcaagacgtgcaggtcatgctttggagcctatgcactgtacacaatggcaaaaccctatgactttggcatcatctgccattgatgtccagcctctgacatgctctttgatttgttaaatgttaaatgagactttaaggctactagaaactagtaattaagtttcttaatggactgagtagccacctacttgtccggctagaatgtttgttgatgtatgagtttagattaacactcaaaagcactaggacagatgtacatagaaggtgcctactcattgtattttgatgatttcattaacaggtaaataaaagttaatacaaaaggaacgagtgtgacaatatgaatatctgctcaatcatcgggcacaattactttcatttggtgacttccaaggacaaaaaggtagtatgagtctggactcccaagatggatctaactctcaaggtatgttctaactgcttccagggaagggtttgttaggcatggcaactgatggcaggtgtccagaaagagtgacctggtgtccccgaggaagctgggttaactctttactgtgtccacaaaactacccatcatatgaggaaggggtatacgcagtgtgaccctcaaaaagcttttagcctagcctttgacagaaatgagtatgcattaaaaaaaagtctatttttcacattaaggttctaaaaattgtttccagagttttaaattatttatgtgcctgttgcttcaaagaggacttggtagcatttcctaaattttgtaatctggcttccgataatccaaagggaataactcaaatgtatgaataggcattttaaatgggaagaaactgttttttggatgaatgattaaaagtgaactgtataaag

SEQ ID NO: 503 - protein, 350 aa, Human
MIRQERSTSYQELSEELVQVVESSELADEQDKETVRVQGPGILPGLDSESASSSIRFSKACLKNVFSVLLIFIYLLLMAVAVFLVYRTITDFREKLKHPVMSVSYKEVDRYDAPGIALYPGQAQLLSCKHHYEVIPPLTSPGQPGDMNCTTQRINYTDPFSNQTVKSALIVQGPREVKKRELVFLQFRLNKSSEDFSAIDYLLFSSFQEFLQSPNRVGFMQACESACSSWKFSGGFRTWVKMSLVKTKEEDGREAVEFRQETSVVNYIDQRPAAKKSAQLFFVVFEWKDPFIQKVQDIVTANPWNTIALLCGAFLALFKAAEFAKLSIKWMIKIRKRYLKRRGQATSHIS

SEQ ID NO: 504 - DNA, 2571 bp, Human
agcttcgcgctagtgctgtttttttttttttttttttttagcaatggcggttcccggcgtggggctcttgacccgtttgaacctgtgtgcccggagaagaactcgagtccagcggcctatcgtcaggcttttgagttgcccaggaactgtggccaaagaccttaggagagacgagcagccttcagggagcgtggagacaggctttgaagacaagattcccaaaaggagattctctgagatgcaaaatgaaagacgagaacaggcacagcggactgttttaatacattgcccagagaaaatcagtgaaaacaagtttcttaaatatttatcccaatttggacctattaataatcatttcttctatgaaagctttggtctctatgctgtcgtagaattttgccaaaaggaaagcataggttcactgcagaatgggactcatactccaagcacggccatggagactgcaattccattcagatcacgtttcttcaatctgaagttgaaaaaccagacttctgaacggtcacgcgtacggtcaagtaatcagttgccacgttcaaacaagcagctttttgaattactttgttatgcagaaagtatagacgatcagctgaacactctcttgaaggagttccagctaacagaggagaacactaagctccgatatctcacctgttctcttattgaagacatggccgccgcgtattttccagactgcatagtcagaccctttggctcctcagtcaacacttttgggaagttaggatgtgatttggacatgtttttggatctagatgaaaccagaaacctcagcgctcacaagatctcaggaaattttctgatggaatttcaagtgaaaaatgttccttcagaaagaattgcaactcagaagatcctgtctgtgttaggagagtgccttgaccactttggccctggctgtgtgggtgtgcaaaaaatattaaatgcccggtgtccgctcgtgaggttctcacaccaggcctccggatttcagtgtgatttgactacgaacaataggattgccttgacaagttccgaactcctttatatatatggtgccctagactcaagagtgagagccttggtgttcagtgtacggtgctgggctcgagcacattcactaacaagtagtattcctggtgcatggattacaaatttctcccttacaatgatggtcatcttttttctccagagaagatcaccccctattcttccaacactagattccttaaaaaccctagcagatgcagaagataaatgtgtaatagaaggcaacaactgcacatttgttcgtgacttgagtagaattaaaccttcacagaacacagaaacattagaattactactgaaggaattttttgagtattttggcaattttgctttcgataaaaattccataaatattcgacagggaagggagcaaaacaaacctgattcttctcctctgtacattcagaatccatttgaaacttctctcaacataagcaaaaatgtaagtcaaagccagctgcaaaaatttgtagatttggcccgagaaagtgccttgattttacaacaggaagatacagatcgaccttccatatcaagtaatcggccctgggggctggtatccctattgctaccatctgctccaaacagaaagtcctttaccaagaagaaaagcaataagtttgcaattgaaacagccaaaaacttgctagaatctttaaaaggtaacagaacagaaaatttcacaaaaaccagtgggaagagaacaattagtactcagacatgatggctgctacattgtgtaaagaactgggcttagcctatcaaatggtctgtggacttacttggaaaaactgatttgaaactttcacagatctcagctttcatctgatgtcacttttcatgatcttctcattggcccccttaacctggtctgaagttctgggatgttttcagtttgatcagtctgatactcagtggcactttattaaaacatcagctgtggagtgtggcggtgcacacctgtagtcccagctgctcaggaggctgaggcaggaggatctcttgagcccaggattttgaatccatcgtggacaacatagcaagattccatctctaaaaaaaatgaaaataaacataagccacaaggaatgggtgaaagattattgtaatgtgctttaactaaataggtaaatatactaaacaaatgctaaaactcagttttaggatgaaaccattgttgatatccacatcagtccctgtttagaaaacatttaaaatgacttttagttatgtacagtacgttggcaatgaatacattaagcttcaaaatttggtagtgctctcgaatatgtatatttgtatttttcaagcgaagttctcttattcacatataaattaaagtgggttggtactgatatcaaaaaatgtttatgtttttagaacagacatttcagtcactgcattcttaggtattccaaaccaaatatgatgacatcaatagattgcattttaaaaatattgtttgatttttctattttcaaaaataaaattctgtttctaact

SEQ ID NO: 505 - protein, 582 aa, Human
MAVPGVGLLTRLNLCARRRTRVQRPIVRLLSCPGTVAKDLRRDEQPSGSVETGFEDKIPKRRFSEMQNERREQAQRTVLIHCPEKISENKFLKYLSQFGPINNHFFYESFGLYAVVEFCQKESIGSLQNGTHTPSTAMETAIPFRSRFFNLKLKNQTSERSRVRSSNQLPRSNKQLFELLCYAESIDDQLNTLLKEFQLTEENTKLRYLTCSLIEDMAAAYFPDCIVRPFGSSVNTFGKLGCDLDMFLDLDETRNLSAHKISGNFLMEFQVKNVPSERIATQKILSVLGECLDHFGPGCVGVQKILNARCPLVRFSHQASGFQCDLTTNNRIALTSSELLYIYGALDSRVRALVFSVRCWARAHSLTSSIPGAWITNFSLTMMVIFFLQRRSPPILPTLDSLKTLADAEDKCVIEGNNCTFVRDLSRIKPSQNTETLELLLKEFFEYFGNFAFDKNSINIRQGREQNKPDSSPLYIQNPFETSLNISKNVSQSQLQKFVDLARESALILQQEDTDRPSISSNRPWGLVSLLLPSAPNRKSFTKKKSNKFAIETAKNLLESLKGNRTENFTKTSGKRTISTQT

SEQ ID NO: 506 - DNA, 4558 bp, Human
ggtcggctctatgttcgcggtcttaacctctcctctggccgagtccttgcaagaagtgaattacccgaccctgcaaaacacttactattttggagtttaaagtatgtcatcatggcaaagtttcggagaaggacttgcatcattttggcactttttattctatttattttctctctgatgatgggtttaaaaatgctgagaccaaatacagctacttttggagctccttttggacttgaccttcttccagaacttcatcaacgaactattcatttggggaaaaattttgatttccaaaagagtgacagaatcaacagtgaaacaaataccaagaatttaaaaagtgttgaaatcactatgaaaccttccaaagcctctgaacttaacttggatgaactaccacctctgaacaattatctacatgtattttattacagttggtatggaaatccacaatttgatggtaaatatatacattggaatcatccagtgttagggcattgggaccctagaatagccaagaattatccacaagggagacacaaccctccagatgacattggctccagcttttatcctgaattgggaagttacagttctcgggatccttctgtcatagaaactcacatgagacaaatgcgctcagcttcaattggtgtactagccctctcttggtacccacctgatgtaaatgatgaaaatggagaacctactgataacttggtacccactattttggataaagctcataaatataacctaaaggttacttttcacatagaaccatatagcaatcgagatgatcaaaacatgtacaaaaatgtcaagtatattatagacaaatatggaaatcatccggccttttacaggtacaagacgaagactggcaatgctcttcctatgttttatgtctatgattcctatattaccaagcctgaaaaatgggccaatctgttaaccacctcagggtctcggagtattcgcaattctccttatgatggactgtttattgcccttctggtagaagaaaaacataagtatgatattcttcaaagtggttttgatggaatttacacatattttgccacaaatggctttacttatggctcatcacatcagaattgggctagcctaaaattattttgtgataaatacaacttaatatttatcccaagtgtgggcccaggatacatagataccagcatccgtccatggaacacgcaaaacactcggaaccgaatcaatgggaagtattatgaaattggtctgagtgccgcacttcagacacgccccagcttaatttctatcacctcttttaatgagtggcatgaaggaactcagattgaaaaagctgttcccaaaagaaccagtaatacagtgtacctagattaccgtcctcataaaccaggtctttacctagaactgactcgcaagtggtctgaaaaatacagtaaggaaagagcaacttatgcattagatcgccagctgcctgtttcttaatgcattgattaaagtttaatagttatcaaaatcacctaatttttaaaaatagctttcgttttgagttctggaaagaaaactgtcaaaatcagtatatactattagttatatttaaaaatatttttttaaattctttacagataatattatacttgttacccttcacaataccacatgagaaaatatctgagacaaaatgtatacaaatatattccttatggcataatttattgcatttctgactgaaatcaaaattctgatttgatggcaattgaattttcattttacaatagataaatgcttgtgttacctaaagcacttagcacacagttaaattatatttacatcctagacccaaataaataggattgtgtgtatatttgggatatctattgaagaaaaaaagaaaaccccttaaagataatgtacatgcttcatgtcatgtctttaaaataatttaatcaactttattgtcttagtatttagactctggataactctacaataatgaggaaattcttaagaataacaaaatcactgtaccttcctctcaattttgctgtgaacctgaaatggctttaaattaatactcttattttttatttaatttaattacataaattaaaccttaccatgaccaaattgtgttaggaaggcctgctatctacagcacagtgtgtcatttgcagatttgtggttacctataccacgctaggtgttttgacatgtttagtgtttctgctttacagtgctgaattccatattttagaagctatgaaagtccttttatgaaaaagttactgattgcttctcagttattaggaaaacagttgtttcacaattattatgtagatatgatgcccaaatatcatttttagtatatcttgtcgatctttaagttgttactattgtgttattcatgtctttaaatcagataccaaatattttttaggaaagaaaaatgttattactgtcattaggttgtcttttaatactttaagttattttgacgaaaagtaatagagaaaatttacttagcattttagattctagagacatggaaatgaaaattattttatgtctagagtaggtcctgaagtttggctttacattaagtttagcactgtatcagaatgaagaaactaatattttacataaaaactaatactttcaattttttatatagtaatatccccattttgtaaatgttagacttttatcatacctgtaagttaaaatacttgttatcaataacttgtcatattgtgacaaattgatcacttgtgtacgaaaaataaatctccttaaaaactaaataaaatgcactgtattcttacagttaatgtttataactatagtaaaaaattaatatatatcctattacataaatgttatttcttaggtgttccattaagaagagcaatagaataatgctaaaaaataatgcctataaatcttcagagtataaagacatccattcagaaacaaaaattagcactaaattttttataaaatagaccagatgacaaaatttattttatttttaaacagtggttttgacacaaattatgttattgaaaagcattattaatgtttaatttatttaaaattttggaatttgccatttctcagacaatgatcaggccttaggaaattaatacagtagtagtaatcattttctaggggaaaataaaagaataaatcactatactgatattttgatataagcaagcacttacatggtaatcactatatagatccaacctgtggattttcttcttatgtccatttaactagaatatattattttaggtataatttacaaatgtcacacctaataatcttttataatataccatatttcattaaagttttgttagagaagtatctaccacagaggagtttttgtcattgtgtacgttgtgtatttgaacccaccatgacagaaagtaaattttaggaaatagttatgagattaagggaaaatctataaaaacaaggttagcatattctcaacacagataccaccactttctttttcccattatagacatggtgaatccacacagcatacttcatctctgagctttgttgtgattcctcaacacattaccctaaccagccagcagtaacagatttcagagtaagataaagcagattctgtcttcattgcaaaaagttattctcaatggaagaatggcatctgatctcataattactagtttatattaatatagtttttttctccctttttaataaaataattacagtcatccctcagtgtctgtgggggattggttccagttacccctatagataccaaaatctgcagatgctcaagtccctgatataaactggcatagtagttgcatataatctatgcacatcctcctgtatacattaagtcatctctagattatttataacacttaatacaatgtaaatgctatgtagttgttataccatactggttagtgaataattacatgaaaaaaaagagtctgtacatcttcagagtttcagtcggcaatttcttggccatggatgtagaacctacagataaggtgagccaactgcattaggaaataactctaataattctgttaattcttagagaggaaaactttcaaaatcttcctcaggtatttattacaactgcctttaccattttagttgtaacacagtttaaattgttatgataacaagtaaataagagcaaagaatttatttcttaattcaaaactatacgtttgaattcaatatggtataacttaaagtggtataatacatacaatgcatgaatcataatggattcttttataagttattaatttttatggtttaatcagtctaattgttttgactgttatagaaaccaaatattttactgtttcttttaaggactaatattgtcaaaaactgctgttattaacttcacttgagttgtttaacttccttctgttttaagattgtaattaaaaattactattttgttatatggaatggttaatttttacctaataaaaacatagatgaaataaaaaaaaaaaaaaaaaaa

SEQ ID NO: 507 - DNA, 5061 bp, Human
ggagctctctccgtcgtccggaggagccgcggaggcgctgtcctggccggagatgttcccggcgctggagtccgactcgccgctgcccccggaggacctggacgcggttgtcccagtcagtggagccgtcgccggtggcatgttggatcggatccttctggagtccgtgtgccagcaacagagctgggtccgggtgtacgatggtaaaggaccacccacccaccgtctgtcttgtggtcagtcaccctacaccgagacaacaacgtgggagcggaagtattgcatcctcacagacagccagttggtattgctcaacaaggagaaggagatacctgtggaagggggacaggagcagcagacagattccaccaaagggcgatgcctgaggagaactgtcagtgtcccttccgagggtcagtttcccgagtacccaccagagggcgccactaaactggaggtaccagcagaaaggtcccctcgtagacggagtatctcagggaccagtacatcagagaaacccaactccatggacactgcaaatacctcacccttcaaagtaccaggattcttcagcaagcgcctgaaaggctccatcaagaggaccaaaagccagtcaaagcttgacagaaacacgagctttcggcttccatcccttcgcagtacagatgacaggtctcgtgggctgcctaaactaaaagagtcacgttcccatgaatccttgctgagcccatgcagcacagtggaatgtctggatcttggtagaggggaacctgtatcagtgaaaccacttcatagtagcatccttggacaagacttctgctttgaggttacctacttaagtggaagtaaatgcttcagctgtaattctgcttctgagagagacaagtggatggaaaaccttcgcaggacagttcaacctaataaggacaattgcaggcgagctgaaaatgttcttcgtttatggatcattgaagccaaggaccttgcccctaaaaagaaatatttctgcgaactgtgccttgatgataccctctttgctcgtacaaccagcaagaccaaagcagacaatattttctggggcgaacattttgaattcttcagccttccacctcttcatagtatcacagttcacatttacaaggatgtggaaaaaaagaaaaaaaaggacaagaataattatgtagggctagtcaacatccccactgccagtgtgactggtcgccaatttgtagaaaagtggtatccagtgagtacacctacacccaacaaaggaaagacaggaggaccttctattcggattaaatcacgtttccaaactatcaccattctgcctatggagcaatacaaagaatttgcagaatttgtcaccagcaactacaccatgctgtgttctgtccttgagccagtaattagtgtgagaaataaagaggagttggcttgtgccttagtgcacattcttcaaagtactggcagagccaaggattttctgactgacttggtgatgtctgaggtggatcgttgtggagagcatgatgtcttgatcttcagagagaacactattgccaccaaatccattgaggaatacctcaagttggtgggacaacagtatcttcatgacgcactgggggagtttatcaaagctttgtatgagtccgatgagaactgtgaagtggatcccagcaaatgttcatctagtgaactgatagaccatcagagcaacctgaaaatgtgctgtgagctggctttctgcaagatcatcaactcttactgtgttttccctcgtgagttgaaagaagtgtttgcatcatggaagcagcagtgcctgaaccgtggcaagcaagacatcagcgagaggctcatcagtgcctcattatttctccgttttctgtgtccagccattatgtctcccagtcttttcaaccttatgcaggagtatcctgatgaccgcacatctcggactctaactcttattgccaaggtcattcagaacctggccaactttgccaagtttggtaacaaagaggaatacatggcattcatgaatgattttttagaacatgaatggggtggaatgaagcgctttcttttggagatctctaatccagacaccatctcaaacaccccaggctttgatggttacattgatctgggccgagagctttcagttttgcattccttactgtgggaagtagtttcccaacttgataagggtgaaaattccttcctacaggcgaccgtggcaaaattggggcctctccctcgtgttcttgctgatattaccaagtcattgactaatcctacgccaatacaacagcaactgagacgcttcactgaacataactccagtccaaatgtcagtggaagcctctcctctgggctgcagaaaatatttgaagaccccactgacagtgatttgcataaactaaaatctccaagccaggacaacacagacagctacttcagagggaaaacattattgctggttcagcaagcctcctctcagagcatgacttattctgaaaaggatgaaagggaaagtagccttcctaatggtcggagcgtctccctcatggacctccaggacactcatgctgctcaagtggagcatgcatctgtcatgcttgatgtgcctatacgcttgaccggaagccagctttccataacccaggtggccagcatcaaacagctgcgggaaacccagagcactccccaaagtgcaccccaagtgagaaggcccctgcacccagccttgaaccagccaggtggccttcagcccttgtcgttccagaaccctgtctatcacctcaataacccaattccagcaatgccaaaggcctctatagattccagtttggagaacctaagcactgccagttccagaagccaaagtaacagtgaagacttcaagctcagtggacccagcaatagcagcatggaagatttcactaaacgtagcactcagagtgaggacttctccaggcggcacacggtgccagatagacacatacctcttgctttgccacgacaaaatagtactgggcaggcccagatccgaaaagtggaccagggtgggttaggtgcccgagccaaagccccaccatccctgccacacagtgcttctttacgtagcaccgggagcatgtcagtggtgtccgcagccctggtggccgaacctgtgcagaatgggagccggtcccggcagcagtcctcttcctccagagagagccctgttcccaaagttagagcaatccagagacaacagacacagcaggttcagtcacctgtggactctgccacaatgtccccagtagagaggacagcagcctgggttctgaacaatgggcagtatgaagaggatgtggaagaaactgagcaaaatctagatgaagccaagcatgctgagaagtatgaacaagaaattactaaactgaaggagcgcctgagagtttccagccggcgactggaggaatatgaacgccgcttgctggtgcaggagcagcagatgcagaagctgctgctggaatacaaggcccgactggaggacagcgaggagcggctccgaagacagcaggaagaaaaagatagccagatgaaaagcatcatcagcaggctaatggctgtggaagaggaactgaagaaggatcatgctgagatgcaagcagttattgatgcaaagcagaaaataattgatgcacaggaaaaacggatcgtgtccctggattcagccaacaccagactgatgagcgcgctgacccaagtgaaggagcggtacagcatgcaggtccgcaatggcatctcccccaccaaccccaccaagctttccatcacggagaatggtgaattcaaaaacagcagctgctgacgggctttgtctgtggaaggagacagaaggaaattgacccactctcctatctccagacctttacctagcccctccaggtttacagaatgttgctacttcacaatggcgatgtggtgagaaactcctgaatgaagaaaggaaccttgtctttcagggcataaggcggcgacttccaaggtcaatgcttttcccccacatctctatgtacatagggaacttagttctgggccatgtacagaaaatatcactgtaatataccaaaaggaagttaataatgtagattacctttttgattattgctatttttattattgttttcctcttgttgaaagcactgcagttgttacaggaagtaaagtaggaactgttgtgtgagcgagacatgagcctgtaggttcagtaggtagagaccaagcatctatctgatagaagcacatggagtgcaataggacattgtgagaaggaatttttcagggattcatctactagtttaaaaaccccactctggccctcttgtcctttcagaaaacatgcaaataccaagatccatacaaaacaataatttattccactgatcaaccaagactggttctggttggacagctaatctgatttggggattcactgtttcagaggacacagacaaaagctgttgcatcaaaactggactttaggagtaatttctattgaactcctgtcaatatgtttatttcctctgtctacagcagatgggagtcttctcttttagacaggggctttttgtttttaaccccaattgtaataaagggtgttctttttcctctttagagtttacaaaactataaatatttgtgtctccacataccatcttcatcttcacacattcactgtgctttcctccccatagtgggagctgtcatcaccaacagggtttactctcccctggagaggttatttaaatagctgtccataagccatccagatcaacaccctttcttccatacagaaaagggctaaccataccacagctggaatctctgaatatttcctattaaaaattttttctatgtgttgttataatttttgtttgggataaagactctatccattgtactagcaaatctatggggggtaattttatctccatctttaacttttaaagtacttcttccccttatcccctcaataaagaaaggaaatccaaaaaaaaaaaaaaaaaa

SEQ ID NO: 508 - DNA, 1837 bp, Human
gccacacgtttgcttcttccctgtgttcccagctggagggacatgagtgtccctgggccgtcgtctccggacggggccctgacacggccaccctactgcctggaggccggggagccgacgcctggtttaagtgacacttctccagatgaagggttaatagaggacttgactatagaagacaaagcagtggagcaactggcagaaggattgctttctcattatttgccagatctgcagagatcaaaacaagccctccaggaactcacacagaaccaagttgtattgttagacacactggaacaagagatttcaaaatttaaagaatgtcattctatgttggatattaatgctttgtttgctgaggctaaacactatcatgccaagttggtgaatataagaaaagagatgctgatgcttcatgaaaaaacatcaaagttaaaaaaaagagcacttaaactgcagcagaagaggcaaaaagaagagttggaaagggagcagcaacgagagaaggagtttgaaagagaaaagcagttaactgccagaccagccaaaaggatgtgaaaagttgtgtttgtgtgttttcttctcctgtcccatatttgggttatgatgactcaagtgtagactgaagttgaggtagtgccttatgccattatgtcatatgttgaaatccttattccggtattactgtgtctccatgccttttttccaagtagcagacgtcatgttgcatggtttttgatatttatatgtaagtttttcaaattttgcttaattttaaaatttattattttgatcttgaattatttataaactggaaagtggtttgattattgtgagtcaaaactctaagtggttaaaaattagtatgaattttttagcttcttaatgaatatggatttaaaactctccagttcttattttatgaaatgacttgcctttctggtaatacaatgctgattttttagtaattgccttttcattactttgttaagaagaaatgccagctgtttaatcacacctacccctggaaaagaggtaaaccttttgaacagttgaatttcatcagaagctctatagctttttggtgagaggaagtgatactctttattacaagaaacaaggaattaacaaaaataaggaacttgttgctacctttcttttctgttgaacattaaaaataatttggtttgtggactgggcatggtggcttatggaaaagaggtgagcctttgtgaagaacataatggaaaagtgcatgtacgggaaataacagcactttaggtgtagttcaggtgagcaagatgccagatagtttctactaaccatatactctttctgcttcttagcgtcgttgtcactgcttctgtggcttttgggttcaaagtagattatatatattcctaaagcttggtggaggtagtggagctatcacacactcaaatgagcttgtatatttataatacaatatagtattatagtaacagttatcatacactgagatatagtttctgtgcttgtaaaaaattcttgaagtgaggccgggtgcggtggctcatgcctgtaatcccaacgctttgggacgccgaggcgggtggatcatgaggtcaaaagattgagaccatcctggccaacatggtgaaaccccgtctctactagaaatacaaaaattagctgggtgtgggggcgtgcgcctgtagtcccagctacttgggaggctgaggcaggagaattgcttgaacccaggaggcagaggttgcagtaagccaagatcgtgccactgcactccagccttggtgacagagcaagactccgtctccaaaaaaaaaaaaaaaaa

SEQ ID NO: 509 - DNA, 4802 bp, Human
gagaaggttttactcttttagaaagcagcagattgtaaaaagtgtgacaaacacatgtagctgatgaaaaggagcatgatgaacaacagtatgaatgaaaataattatatgaatgataatttctcattcaggtgtgaaaacttaggtgaatgggtatatttggagcattacttcaaatacatagtcttcaggctgtccattggtgatgatgactgtaacttctggcttctcaagaatttcttctctaatatatgatgaaaaatttagtgcagaggagatatggtggagctggatacagctaagagttagtgaaataactgtttttcatgtctggcccccccttttttttttgtttgtctgtggcaattcttagctttatgaccctatctagagcactgcaaattttcacctactttgtctacagtatccagctgtctttttaagttgaccaggcttttgtgctcagtaattataaacaagacaatttagaggcttaatctggaacataattaaacatcctacacactcaaaccaagtagtaatggctttaggattgttcagtgtttaatttaccttttattttttgcattcaggtagtgtctgccatattcgtacctctccaccttgtctcacagtctgtttcacttctattaactgcttctcttctattccaaatgatttttagtactaactacattttcatgacagcattcatcacatttgatctgaacgtgactttttagatcctcaccatttctgctctcaaattgaaagtcatttgtccatccatccaacatatatggtgaacaaaacataatccctgccttcaaagaatctgtgatctagaagtgttatcagacaagtaaagaggcaactgtagtacacttcggtaattgttgggataaggctaagttcagaggatgtggggaggatataagaggggcagcaaacctagtcctgaggaatttggattcttaggaaaaggaagagctaagtcagggtccggagaagttgtagaaactagctaaccaagaagagaggcagagaaggtgtgctcagcaccaaaagcaattgcaaagatctaggaggtaagagagtcagcttcaatactgatggtaagaaagaaataggaagatgataggtcactttgaagtctgaagggtatccttttttctgtattccagttctgagacagcaagattttcaagtcagataaacagatttgaattcttaactgtgaggccttcctttattacttatttgaaatagaaggcctgcccttcctttctctgtttctattagcttctttatttttctccagatatttatcaccatatgatgtacattatattttacttatatatttgtttattgcttgtttttctcccaattgtaaatttaatgtgattttgactgttttattcaccactgtagcatctgaaattgtgcctaacagaaagtaaatggttagtaaatttttgttgaagaaataagtccttattctcatctgttacttggttatgtgaatttaggcaatttacttaaccattcaaagattggtttccttattggttaaataggaataatatctaccaaatgaggagtaaatgagataatttgtgtaaaataatcagtataataaaattctacaattctttatgtgaaatctttgtgaccaaatgcaatttggaattcagaattcttcatattttagaaaggtactaatatagtcggctctccacatctatgggttctgcatctgtggatttaaccaactttgaattgaaagtatttggtgaaaaataacaatacaacaataaaaaataatacaaattaaacaaccaatatagtgtaacaaccatttacgtagcatttacattgtcttaggtactatttataacctagagattatttaaagtacatgggaagatgtgtaaaggttgtatgtaaatactgtaccattttatatcagggatttgagcatctgtagattttggtattcaaggagggaggatcctggaactaatcccctgtggataccaagggatgacagtgtattttatattatacatcttagagtctagggcagcagtccataacaaatagtaacatttctacagcaaaacatacaggtattcacaattaaatgggataaatgaagattctgtagtagcttcacatcttttcggtcagatttttgcctagaggcaaaatctacagttgaattcagttttttatgcagtcaaattagttatagaataactttgatttttcagagctttatggatattggaacattgatatgggatggtggacctgtacctaacacacacataaacaaatgtaaaaattactatgaagtacttggagttacgaaagatgctggtgatgaagatttgaaaaaagcttatagaaagcttgctttgaagtttcatccagacaaaaaccatgcacctggagcaacagatgcttttaaaaagattggaaatgcttatgctgttttaagtaatccagaaaagcgaaaacagtatgacctcacgggcaatgaagaacaagcatgtaaccaccaaaacaatggcagatttaatttccatagaggttgtgaagctgatataactccagaagacttgtttaatatattttttgggggtggatttccttcaggtagtgtacattctttttcaaatggaagagctggttatagccaacaacatcagcatcgacatagtggacatgaaagagaagaggaaagaggagatggaggtttttctgtgtttatccagctgatgcccataattgtattgatcctcgtgtcattattaagccagttgatggtctctaatcctccttattccttatatcccagatctggaactgggcaaactattaaaatgcaaacagaaaacttgggtgttgtttattatgtcaacaaggacttcaaaaatgaatataaaggaatgttattacaaaaggtagaaaagagtgtggaggaagattatgtgactaatattcgaaataactgctggaaagaaagacaacaaaaaacagatatgcagtatgcagcaaaagtataccgtgatgatcgactccgaaggaaggcagatgccttgagcatggacaactgtaaagaattagagcggcttaccagtctttataaaggaggatgaactggaatttttatttataccttttagcgtactctttattttttctgtaagtaagtttggtttcatcatgagggatgaaggaaaagatttgatactgaaaactaaactgaatagttggttcctgaaatcttggactgtttatgacctactggctcctttaaatagtaactgaaaactaaaatggaatattttagttaacgcttctacaagtattttcattttaaaagcttacatgattcctaactaaagtgtcatgagaaaggattatcacacctgtagcaatttccagttttagtgattctccattttttcccttgtcatgtaaatatttatggaatgatcattttgtgtacatacaggttactgcttttttatttaaattcttttagtgtttagctccatgagacacttcagtttaaattgatggaataaatgttatatgacacatttacattttccttatcaaggtgtcaaatatgtggactttaaacaatgaaactttttcaaaaagaaaaaacaaaaactttaactttgtgtaaaatcttatagtattatcagcttagagggaattgatatttttaatattgccgttatattccaaaatatatattgagataaatgaactggtgtagaatatcagtttgctatttagttttatgaattactatacatatacatgcatagaaatgaaatgctatactgataaattttaaagaaaatatgaggaagtggctataaatattaaactaaaagggtcttcaacagtaaagtgcagttatgtcatttaaaattccaatactttaaaggccaccaaattttgatgtatatgtccttgaagggctgctaaaatttatgaagaggactcacattttcccccatagaaatttgcagtttcttggtgatcatttaagcaggatccaaagaagttcctttacaaataagtaataagaaaaatgagtactaaaatacagctttgtgccttttaaccctatgccaactcctaaacatataagtagattacagtatacttatctgatcagagcatgatctgtttggccacatgcaagtgtgagcagaaatagagcagcacgtagaatagtaacttaaagcaagtcatcctttaaaaattctgagctaaaatctatttaccattgagtaattgaattaatcccataggaataagctccttgtaagtaaatccatgatatgaattagaaaaaaaaacagctggaaattgaagtttttgatgcctgtatactgggtatgaaactatttgatttctagtcttctgtgtttagcagttgtaatattttaatgattttgcttcatactcggttaatggaacataaacatatctttgatacttctttgtgagtgagagaatgctagatagggtggctttgttctttgtttaagttttttttcctgaatgtagttaatttatggcatctgttgaataaaactgctaaaatgacctcttaaaaatgttctgttgtatccccttttccaggtgaatcaatagaaatgcctgattgaattagtaggttaaactaaacaacatactgtcataggaaaactggagagcttaaccaacttgctcttagaaatgttaccttaaaaaaaaaaaaaaaaaaa

SEQ ID NO: 510 - DNA, 2797 bp, Human
ctctggtggctagcctgtcctgacaggggagagttaagctcccgttctccaccgtgccggctggccaggtgggctgagggtgaccgagagaccagaacctgcttgctggagcttagtgctcagagctggggagggaggttccgccgctcctctgctgtcagcgccggcagcccctcccggcttcacttcctcccgcagcccctgctactgagaagctccgggatcccagcagccgccacgccctggcctcagcctgcggggctccagtcaggccaacaccgacgcgcagctgggaggaagacaggacccttgacatctccatctgcacagaggtcctggctggaccgagcagcctcctcctcctaggatgacctcaccctccagctctccagttttcaggttggagacattagatggaggccaagaagatggctctgaggcggacagaggaaagctggattttgggagcgggctgcctcccatggagtcacagttccagggcgaggaccggaaattcgcccctcagataagagtcaacctcaactaccgaaagggaacaggtgccagtcagccggatccaaaccgatttgaccgagatcggctcttcaatgcggtctcccggggtgtccccgaggatctggctggacttccagagtacctgagcaagaccagcaagtacctcaccgactcggaatacacagagggctccacaggtaagacgtgcctgatgaaggctgtgctgaaccttaaggacggagtcaatgcctgcattctgccactgctgcagatcgacagggactctggcaatcctcagcccctggtaaatgcccagtgcacagatgactattaccgaggccacagcgctctgcacatcgccattgagaagaggagtctgcagtgtgtgaagctcctggtggagaatggggccaatgtgcatgcccgggcctgcggccgcttcttccagaagggccaagggacttgcttttatttcggtgagctacccctctctttggccgcttgcaccaagcagtgggatgtggtaagctacctcctggagaacccacaccagcccgccagcctgcaggccactgactcccagggcaacacagtcctgcatgccctagtgatgatctcggacaactcagctgagaacattgcactggtgaccagcatgtatgatgggctcctccaagctggggcccgcctctgccctaccgtgcagcttgaggacatccgcaacctgcaggatctcacgcctctgaagctggccgccaaggagggcaagatcgagattttcaggcacatcctgcagcgggagttttcaggactgagccacctttcccgaaagttcaccgagtggtgctatgggcctgtccgggtgtcgctgtatgacctggcttctgtggacagctgtgaggagaactcagtgctggagatcattgcctttcattgcaagagcccgcaccgacaccgaatggtcgttttggagcccctgaacaaactgctgcaggcgaaatgggatctgctcatccccaagttcttcttaaacttcctgtgtaatctgatctacatgttcatcttcaccgctgttgcctaccatcagcctaccctgaagaagcaggccgcccctcacctgaaagcggaggttggaaactccatgctgctgacgggccacatccttatcctgctaggggggatctacctcctcgtgggccagctgtggtacttctggcggcgccacgtgttcatctggatctcgttcatagacagctactttgaaatcctcttcctgttccaggccctgctcacagtggtgtcccaggtgctgtgtttcctggccatcgagtggtacctgcccctgcttgtgtctgcgctggtgctgggctggctgaacctgctttactatacacgtggcttccagcacacaggcatctacagtgtcatgatccagaaggtcatcctgcgggacctgctgcgcttccttctgatctacttagtcttccttttcggcttcgctgtagccctggtgagcctgagccaggaggcttggcgccccgaagctcctacaggccccaatgccacagagtcagtgcagcccatggagggacaggaggacgagggcaacggggcccagtacaggggtatcctggaagcctccttggagctcttcaaattcaccatcggcatgggcgagctggccttccaggagcagctgcacttccgcggcatggtgctgctgctgctgctggcctacgtgctgctcacctacatcctgctgctcaacatgctcatcgccctcatgagcgagaccgtcaacagtgtcgccactgacagctggagcatctggaagctgcagaaagccatctctgtcctggagatggagaatggctattggtggtgcaggaagaagcagcgggcaggtgtgatgctgaccgttggcactaagccagatggcagccccgatgagcgctggtgcttcagggtggaggaggtgaactgggcttcatgggagcagacgctgcctacgctgtgtgaggacccgtcaggggcaggtgtccctcgaactctcgagaaccctgtcctggcttcccctcccaaggaggatgaggatggtgcctctgaggaaaactatgtgcccgtccagctcctccagtccaactgatggcccagatgcagcaggaggccagaggacagagcagaggatctttccaaccacatctgctggctctggggtcccagtgaattctggtggcaaatatatattttcactaactaaaaaaaaaaaaaaaaaaaaaaa

SEQ ID NO: 511 - protein, 764 aa, Human
MTSPSSSPVFRLETLDGGQEDGSEADRGKLDFGSGLPPMESQFQGEDRKFAPQIRVNLNYRKGTGASQPDPNRFDRDRLFNAVSRGVPEDLAGLPEYLSKTSKYLTDSEYTEGSTGKTCLMKAVLNLKDGVNACILPLLQIDRDSGNPQPLVNAQCTDDYYRGHSALHIAIEKRSLQCVKLLVENGANVHARACGRFFQKGQGTCFYFGELPLSLAACTKQWDVVSYLLENPHQPASLQATDSQGNTVLHALVMISDNSAENIALVTSMYDGLLQAGARLCPTVQLEDIRNLQDLTPLKLAAKEGKIEIFRHILQREFSGLSHLSRKFTEWCYGPVRVSLYDLASVDSCEENSVLEIIAFHCKSPHRHRMVVLEPLNKLLQAKWDLLIPKFFLNFLCNLIYMFIFTAVAYHQPTLKKQAAPHLKAEVGNSMLLTGHILILLGGIYLLVGQLWYFWRRHVFIWISFIDSYFEILFLFQALLTVVSQVLCFLAIEWYLPLLVSALVLGWLNLLYYTRGFQHTGIYSVMIQKVILRDLLRFLLIYLVFLFGFAVALVSLSQEAWRPEAPTGPNATESVQPMEGQEDEGNGAQYRGILEASLELFKFTIGMGELAFQEQLHFRGMVLLLLLAYVLLTYILLLNMLIALMSETVNSVATDSWSIWKLQKAISVLEMENGYWWCRKKQRAGVMLTVGTKPDGSPDERWCFRVEEVNWASWEQTLPTLCEDPSGAGVPRTLENPVLASPPKEDEDGASEENYVPVQLLQSN

SEQ ID NO: 512 - DNA, 5963 bp, Human
ttttttttttttttttgcttaaaaaaaagccatgacggctctcccacaattcatcttccctgcgccatctttgtattatttctaatttattttggatgtcaaaaggcactgatgaagatattttctctggagtctccttctttctaacccggctctcccgatgtgaaccgagccgtcgtccgcccgccgccgccgccgccgccgccgccgcccgccccgcagcccaccatgtctcgccgcaagcaaggcaaaccccagcacttaagcaaacgggaattctcgcccgagcctcttgaagccattcttacagatgatgaaccagaccacggcccgttgggagctccagaaggggatcatgacctcctcacctgtgggcagtgccagatgaacttcccattgggggacattcttatttttatcgagcacaaacggaaacaatgcaatggcagcctctgcttagaaaaagctgtggataagccaccttccccttcaccaatcgagatgaaaaaagcatccaatcccgtggaggttggcatccaggtcacgccagaggatgacgattgtttatcaacgtcatctagaggaatttgccccaaacaggaacacatagcagataaacttctgcactggaggggcctctcctcccctcgttctgcacatggagctctaatccccacgcctgggatgagtgcagaatatgccccgcagggtatttgtaaagatgagcccagcagctacacatgtacaacttgcaaacagccattcaccagtgcatggtttctcttgcaacacgcacagaacactcatggattaagaatctacttagaaagcgaacacggaagtcccctgaccccgcgggttggtatcccttcaggactaggtgcagaatgtccttcccagccacctctccatgggattcatattgcagacaataacccctttaacctgctaagaataccaggatcagtatcgagagaggcttccggcctggcagaagggcgctttccacccactccccccctgtttagtccaccaccgagacatcacttggacccccaccgcatagagcgcctgggggcggaagagatggccctggccacccatcacccgagtgcctttgacagggtgctgcggttgaatccaatggctatggagcctcccgccatggatttctctaggagacttagagagctggcagggaacacgtctagcccaccgctgtccccaggccggcccagccctatgcaaaggttactgcaaccattccagccaggtagcaagccgcccttcctggcgacgccccccctccctcctctgcaatccgcccctcctccctcccagcccccggtcaagtccaagtcatgcgagttctgcggcaagacgttcaaatttcagagcaacctggtggtgcaccggcgcagccacacgggcgagaagccctacaagtgcaacctgtgcgaccacgcgtgcacccaggccagcaagctgaagcgccacatgaagacgcacatgcacaaatcgtcccccatgacggtcaagtccgacgacggtctctccaccgccagctccccggaacccggcaccagcgacttggtgggcagcgccagcagcgcgctcaagtccgtggtggccaagttcaagagcgagaacgaccccaacctgatcccggagaacggggacgaggaggaagaggaggacgacgaggaagaggaagaagaggaggaagaggaggaggaggagctgacggagagcgagagggtggactacggcttcgggctgagcctggaggcggcgcgccaccacgagaacagctcgcggggcgcggtcgtgggcgtgggcgacgagagccgcgccctgcccgacgtcatgcagggcatggtgctcagctccatgcagcacttcagcgaggccttccaccaggtcctgggcgagaagcataagcgcggccacctggccgaggccgagggccacagggacacttgcgacgaagactcggtggccggcgagtcggaccgcatagacgatggcactgttaatggccgcggctgctccccgggcgagtcggcctcggggggcctgtccaaaaagctgctgctgggcagccccagctcgctgagccccttctctaagcgcatcaagctcgagaaggagttcgacctgcccccggccgcgatgcccaacacggagaacgtgtactcgcagtggctcgccggctacgcggcctccaggcagctcaaagatcccttccttagcttcggagactccagacaatcgccttttgcctcctcgtcggagcactcctcggagaacgggagcttgcgcttctccacaccgcccggggagctggacggagggatctcggggcgcagcggcacgggaagtggagggagcacgccccatattagtggtccgggcccgggcaggcccagctcaaaagagggcagacgcagcgacacttgtgagtactgtgggaaagtcttcaagaactgtagcaatctcactgtccacaggagaagccacacgggcgaaaggccttataaatgcgagctgtgcaactatgcctgtgcccagagtagcaagctcaccaggcacatgaaaacgcatggccaggtggggaaggacgtttacaaatgtgaaatttgtaagatgccttttagcgtgtacagtaccctggagaaacacatgaaaaaatggcacagtgatcgagtgttgaataatgatataaaaactgaatagaggtatattaatacccctccctcactcccacctgacaccccctttttcaccactccccttccccatcgccctccagccccactccctgtaggatttttttctagtcccatgtgatttaaacaaacaaacaaacaaacagaagtaacgaagctaagaatatgagagtgcttgtcaccagcacacctgttttttttctttttctttttcttttttctttttccttttttttttttttcctttatgttctcaccgtttgaatgcatgatctgtatggggcaatactattgcattttacgcaaactttgagcctttctcttgtgcaataatttacatgttgtgtatgtttttttttaaacttagacagcatgtatggtatgttatggctattttaaattgtccctaattcgttgctgagcaaacatgttgctgtttccagttccgttctgagagaaaaagagagagagagagaaaaagaccatgctgcatacattctgtaatacatatcatgtacagttttattttataacgtgaggaggaaaaacagtctttggattaaccctctatagacagaatagatagcactgaaaaaaaatctctatgagctaaatgtctgtctctaaagggttaaatgtatcaattggaaaggaagaaaaaaggccttgaattgacaaattaacagaaaaacagaacaagtttattctatcatttggttttaaaatatgagtgccttggatctattaaaaccacatcgatggttctttctacttgttataaacttgtagcttaattcagcattgggtgaggtaataaaccttaggaactagcatataattctatattgtatttctcacaacaatggctacctaaaaagatgacccattatgtcctagttaatcatcatttttcctttagtttaattttataaacaaaactgattataccagtataaaagctactttgctcctggtgagagcttaaaagaaatgggctgttttgcccaaagttttattttttttaaacaatgattaaattgaatgtgtaatgtgcaaaagccctggaacgcaattaaatacactagtaaggagttcattttatgaagatatttgctttaataatgtctttttaaaaatactggcaccaaaagaaatagatccagatctacttggttgtcaagtggacaatcaaatgataaactttaagaccttgtataccatattgaaaggaagaggctgacaataaggtttgacagaggggaacagaagaaaataatatgatttattagcacaacgtggtactatttgccatttaaaactagaacaggtatataagctaatattgatacaatgatgattaactatgaattcttaagacttgcatttaaatgtgacattcttaaaaaaagaagagaaagaattttaagagtagcagtatatatgtctgtgctccctaaaagttgtacttcatttcttttccatacactgtgtgctatttgtgttaacatggaagaggattcattgtttttatttttatttttttaattttttcttttttattaagctagcatctgccccagttggtgttcaaatagcacttgactctgcctgtgatatctgtatcttttctctaatcagagatacagaggttgagtataaaataaacctgctcagataggacaattaagtgcactgtacaattttcccagtttacaggtctatacttaagggaaaagttgcaagaatgctgaaaaaaaattgaacacaatctcattgaggagcattttttaaaaactaaaaaaaaaaaaactttgccagccatttacttgactattgagcttacttacttggacgcaacattgcaagcgctgtgaatggaaacagaatacacttaacatagaaatgaatgattgctttcgcttctacagtgcaaggatttttttgtacaaaacttttttaaatataaatgttaagaaaaattttttttaaaaaacacttcattatgtttaggggggaactgcattttagggttccattgtcttggtggtgttacaagacttgttatccatttaaaaatggtagtggaaattctatgccttggatacacaccgctcttcaggttgtaaaaaaaaaaaacatacattggggaaaggtttaagattatatagtacttaaatataggaaaatgcacactcatgttgattcctatgctaaaatacatttatggtcttttttctgtatttctagaatggtatttgaattaaatgttcatctagtgttaggcactatagtatttatattgaagcttgtatttttaactgttgcttgttctcttaaaaggtatcaatgtaccttttttggtagtggaaaaaaaaaagacaggctgccacagtatatttttttaatttggcaggataatatagtgcaaattatttgtatgcttcaaaaaaaaaaaaaagagagaaacaaaaaagtgtgacattacagatgagaagccatataatggcggtttgggggagcctgctagaatgtcacatggatggctgtcataggggttgtacatatccttttttgttcctttttcctgctgccatactgtatgcagtactgcaagctaataacgttggtttgttatgtagtgtgctttttgtccctttccttctatcaccctacattccagcatcttaccttcatatgcagtaaaagaaagaaagaaaaaaaaaggaaaaaaaaaaaaaaaccaatgttttgcagtttttttcattgccaaaaactaaatggtgctttatatttagattggaaagaatttcatatgcaaagcatattaaagagaaagcccgctttagtcaatacttttttgtaaatggcaatgcagaatattttgttattggccttttctattcctgtaatgaaagctgtttgtcgtaacttgaaattttatcttttactatgggagtcactatttattattgcttatgtgccctgttcaaaacagaggcacttaatttgatcttttatttttctttgtttttatttttttttttatttagatgaccaaaggtcattacaacctggctttttattgtatttgtttctggtctttgttaagttctattggaaaaaccactgtctgtgtttttttggcagttgtctgcattaacctgttcatacacccattttgtccctttattgaaaaaataaaaaaaattaaaagtacaaaaaaaaaaaaaaaaa

SEQ ID NO: 513 - protein, 835 aa, Human
MSRRKQGKPQHLSKREFSPEPLEAILTDDEPDHGPLGAPEGDHDLLTCGQCQMNFPLGDILIFIEHKRKQCNGSLCLEKAVDKPPSPSPIEMKKASNPVEVGIQVTPEDDDCLSTSSRGICPKQEHIADKLLHWRGLSSPRSAHGALIPTPGMSAEYAPQGICKDEPSSYTCTTCKQPFTSAWFLLQHAQNTHGLRIYLESEHGSPLTPRVGIPSGLGAECPSQPPLHGIHIADNNPFNLLRIPGSVSREASGLAEGRFPPTPPLFSPPPRHHLDPHRIERLGAEEMALATHHPSAFDRVLRLNPMAMEPPAMDFSRRLRELAGNTSSPPLSPGRPSPMQRLLQPFQPGSKPPFLATPPLPPLQSAPPPSQPPVKSKSCEFCGKTFKFQSNLVVHRRSHTGEKPYKCNLCDHACTQASKLKRHMKTHMHKSSPMTVKSDDGLSTASSPEPGTSDLVGSASSALKSVVAKFKSENDPNLIPENGDEEEEEDDEEEEEEEEEEEEELTESERVDYGFGLSLEAARHHENSSRGAVVGVGDESRALPDVMQGMVLSSMQHFSEAFHQVLGEKHKRGHLAEAEGHRDTCDEDSVAGESDRIDDGTVNGRGCSPGESASGGLSKKLLLGSPSSLSPFSKRIKLEKEFDLPPAAMPNTENVYSQWLAGYAASRQLKDPFLSFGDSRQSPFASSSEHSSENGSLRFSTPPGELDGGISGRSGTGSGGSTPHISGPGPGRPSSKEGRRSDTCEYCGKVFKNCSNLTVHRRSHTGERPYKCELCNYACAQSSKLTRHMKTHGQVGKDVYKCEICKMPFSVYSTLEKHMKKWHSDRVLNNDIKTE

SEQ ID NO: 514 - DNA, 2596 bp, Human
ccgagctgacgggcgtgcggccgctgcgccgcaaactcgtgtgggaggcaccgctccagccgcccgcgggccagcgcaccggtcccccagcggcagccgagcccgcccgcgcgccgttcgtgccctcgtgaggctggcatgcaggatggcaggacagcccggccacatgccccatggagggagttccaacaacctctgccacaccctggggcctgtgcatcctcctgacccacagaggcatcccaacacgctgtcttttcgctgctcgctggcggacttccagatcgaaaagaagataggccgaggacagttcagcgaggtgtacaaggccacctgcctgctggacaggaagacagtggctctgaagaaggtgcagatctttgagatgatggacgccaaggcgaggcaggactgtgtcaaggagatcggcctcttgaagcaactgaaccacccaaatatcatcaagtatttggactcgtttatcgaagacaacgagctgaacattgtgctggagttggctgacgcaggggacctctcgcagatgatcaagtactttaagaagcagaagcggctcatcccggagaggacagtatggaagtactttgtgcagctgtgcagcgccgtggagcacatgcattcacgccgggtgatgcaccgagacatcaagcctgccaacgtgttcatcacagccacgggcgtcgtgaagctcggtgaccttggtctgggccgcttcttcagctctgagaccaccgcagcccactccctagtggggacgccctactacatgtcaccggagaggatccatgagaacggctacaacttcaagtccgacatctggtccttgggctgtctgctgtacgagatggcagccctccagagccccttctatggagataagatgaatctcttctccctgtgccagaagatcgagcagtgtgactaccccccactccccggggagcactactccgagaagttacgagaactggtcagcatgtgcatctgccctgacccccaccagagacctgacatcggatacgtgcaccaggtggccaagcagatgcacatctggatgtccagcacctgagcgtggatgcaccgtgccttatcaaagccagcaccactttgccttacttgagtcgtcttctcttcgagtggccacctggtagcctagaacagctaagaccacagggttcagcaggttccccaaaaggctgcccagccttacagcagatgctgaaggcagagcagctgagggaggggcgctggccacatgtcactgatggtcagattccaaagtcctttctttatactgttgtggacaatctcagctgggtcaataagggcaggtggttcagcgagccacggcagccccctgtatctggattgtaatgtgaatctttagggtaattcctccagtgacctgtcaaggcttatgctaacaggagacttgcaggagaccgtgtgatttgtgtagtgagcctttgaaaatggttagtaccgggttcagtttagttcttggtatcttttcaatcaagctgtgtgcttaatttactctgttgtaaagggataaagtggaaatcatttttttccgtggagtggtgattctgctaacatttttatctacgttttataacttggtgagtgacgatgagagccctgcacctggccagagtgtcacaggcaaaaggcatcgggaagcaggagcatcttcttggcagccaggctgggccatcttctcctggacacctgctgtgtaccaggaacttcgtcacctccttgaatgctggcggttcatttcatgatcagtgttaagcattttcctccatgggaaggaagcatgggatatagaaaagcgaagggctgtcctttacaaattctggttctgcaacttcctagcgtgactttgggcttgggcaagtttcttagccgttctgagccttcatttcctcatctgtacaatgagattaatagtacctatcatctaccttcaggattgctgacagacagaatttgaaataaaatatgcaagttagctaatacaaaaagtagatgatccaaaaatggtagccactcacccttcacaaactgaagtccatggaccacggaagtcgagaattaatgtacacctgtatcatgtgtaggaaaccagaaatgtgttccttatttcttgttcccaaacaggattaactgtgaagactaatttataaatgtgaacctaagaaaactccacctctgaaggaaatcatttgaattttgtttttgtacgtaaagttaaccttccaattgtctgagctgtcgtcactgacttcatgacagtctggccctccagacaagagcagcgctggcatcgggcaggtgattcctgacacctgctgcctgcaggcattcactgaccaggcctttcctggaggaaacacccagggccgggcggctgctgtttccacacgtggactcggatctgctgtgacaccgtcagcccgacagtctctccatatgcagcctttcctctgtacttttctccatggttgaaataaaacagggtgactgggagttacttagaattcatgaagattttaaaaaaaaaaaaaaaaaa

SEQ ID NO: 515 - DNA, 2741 bp, Human
gtgaggcggaagctgtgtatggcgggaggctgtggcggtcccttggtggggaagctgttgctgttgctagacgacgggaactagctctcgtcacttcctcagcccgccgtctgcccactcctctagccggaacctgggggcccggagccggggtaggcacagagttgtcctcggaggtccaggacagcggccagcccggcggcgggagtcagggccacgccacctgcagggaagaacccgagtcgaagcgggaagatggctgcagacaagcctgcagatcagggagcagagaaacatgaaggcacaggtcagtcctctgggatcactgatcaagagaaggagttatccaccaatgctttccaagctttcacatctggaaattatgatgcctgtctacaacaccttgcctgtctacaagatataaacaaagatgattataaaataattttgaatacagcagtagctgagttttttaaaagtaaccaaacaacaacagataatttgagacaaacacttaaccagctgaagaatcaggtccactcagctgttgaagaaatggatggattagatgatgttgaaaacagcatgttgtactataatcaagcagtcattctttatcatctgcggcagtatacagaagccatatcagttggtgaaaaactttatcagttcatagagccttttgaagaaaaatttgcccaagcagtgtgttttttgcttgtagacctgtatatattaacctaccaagctgagaaagctttgcatcttcttgctgtcctagaaaaaatgatttcacagggtaacaataacaaaaatggaaagaatgagactggtaataacaacaacaaagatggatctaatcataaagctgaaagtggagctctaatagaagctgcaaaatcaaagatacatcagtacaaagtacgagcttatatccaaatgaagtctctgaaagcatgtaaaagggaaatcaagtcagtcatgaatacagctggaaattccgcaccctctctctttcttaaaagcaattttgagtacttaagaggtaattatcgaaaagccgtgaagctattaaatagttcaaacattgctgagcatccaggattcatgaaaacaggtgaatgcttgagatgcatgttctggaataaccttggttgcatccattttgccatgagcaagcacaatttgggaatattctactttaaaaaggctctgcaagagaatgacaatgtctgtgcacagctcagtgcaggtagcactgatccaggcaaaaaattttcaggaagacccatgtgtacgttactaaccaataagagatatgagttgctgtataactgtggaattcagcttcttcacattggaaggcctcttgctgccttcgaatgtctgattgaagctgttcaggtttatcatgcaaatcctcgcctctggctacggctggctgaatgctgcattgctgccaataaggggacttctgaacaagaaactaaaggccttcccagcaaaaaaggaattgtacagtctattgttggtcaaggctatcatcgtaaaatagttttggcatcacagtctatacagaatactgtttataatgatgggcagtcttcggccattcctgtagccagtatggagtttgcagccatatgtctcagaaatgccttgttgctgctacctgaagaacagcaagatccaaagcaggaaaatggggctaaaaatagtaatcaattaggtgggaacacagagagcagcgaaagcagtgaaacttgcagcagtaaaagccatgatggagataaattcattccagctccaccttcttctccattgagaaaacaggaattagaaaacttaaagtgctccatacttgcttgcagtgcctacgtggctctggctttgggtgataacctcatggctttgaatcatgcagataaacttcttcagcagcccaagctgtcaggatctcttaagtttttgggacatttatatgctgcagaagccctcatctctctcgacagaatatctgatgccattactcacttgaacccggagaatgtcactgatgtctccttagggatctcttcaaatgagcaggaccaaggatcagacaaaggtgaaaatgaagcaatggaatcctctggtaagcgggcccctcagtgctaccccagttccgtcaactctgccaggactgtgatgctgttcaaccttggcagcgcttactgcctgaggagcgaatatgacaaagcccgaaagtgtctccaccaggcggcttcaatgatccatcctaaagaggtgccccctgaggccatcttgctggcagtctaccttgaactgcagaatggtaatactcagctggccttacagatcatcaaaaggaatcagctgctccctgcagtgaaaacacactctgaagtgagaaagaagccagtgtttcagcctgtccacccgatccagcccatccaaatgccggctttcaccactgtgcagagaaagtgatacttcacttttggaaaactgttacctgagacccaggggagaatttactggccattttagttgtatcacagcagaatgaataaaagatggtgaaggctgttaattttgagtcaattctacccctgacttttggccaaaagcttacttaaaattaaggatttactaagtcatcatcagctgtttttcttaatttcagccagactattaattttgagccattatgtaatatatgccataggcaattaaaacat

SEQ ID NO: 516 - protein, 744 aa, Human
MAADKPADQGAEKHEGTGQSSGITDQEKELSTNAFQAFTSGNYDACLQHLACLQDINKDDYKIILNTAVAEFFKSNQTTTDNLRQTLNQLKNQVHSAVEEMDGLDDVENSMLYYNQAVILYHLRQYTEAISVGEKLYQFIEPFEEKFAQAVCFLLVDLYILTYQAEKALHLLAVLEKMISQGNNNKNGKNETGNNNNKDGSNHKAESGALIEAAKSKIHQYKVRAYIQMKSLKACKREIKSVMNTAGNSAPSLFLKSNFEYLRGNYRKAVKLLNSSNIAEHPGFMKTGECLRCMFWNNLGCIHFAMSKHNLGIFYFKKALQENDNVCAQLSAGSTDPGKKFSGRPMCTLLTNKRYELLYNCGIQLLHIGRPLAAFECLIEAVQVYHANPRLWLRLAECCIAANKGTSEQETKGLPSKKGIVQSIVGQGYHRKIVLASQSIQNTVYNDGQSSAIPVASMEFAAICLRNALLLLPEEQQDPKQENGAKNSNQLGGNTESSESSETCSSKSHDGDKFIPAPPSSPLRKQELENLKCSILACSAYVALALGDNLMALNHADKLLQQPKLSGSLKFLGHLYAAEALISLDRISDAITHLNPENVTDVSLGISSNEQDQGSDKGENEAMESSGKRAPQCYPSSVNSARTVMLFNLGSAYCLRSEYDKARKCLHQAASMIHPKEVPPEAILLAVYLELQNGNTQLALQIIKRNQLLPAVKTHSEVRKKPVFQPVHPIQPIQMPAFTTVQRK

SEQ ID NO: 517 - DNA, 6298 bp, Human
ccgcgttctgcctggtgtcggccacctccgtgtggacggcgggggccgagcccatgagtagggaggagaaacagaagcttgggaatcaagtactggaaatgtttgatcatgcttatggtaactatatggaacatgcttaccctgctgatgaactcatgcctttaacctgtagaggtcgagttagaggccaagagccaagtcgcggtgacgttgatgatgccttgggaaaattttctctgacactgattgattctttggacactcttgtggttttaaataaaactaaagaatttgaagatgcagtgagaaaagttttaagagatgttaatttagataacgatgtagtcgtatcagtctttgaaacaaacatcagagttcttgggggtcttttgggtgggcactccctggcaatcatgctgaaagaaaaaggtgaatatatgcagtggtacaatgatgaacttctccaaatggcaaagcagttaggttacaaacttttaccggctttcaacactaccagtggccttccttatccaagaattaatttaaagtttggcatcagaaaaccagaagctcggacaggaactgagacagatacctgtacagcttgtgcaggtaccttgatccttgaatttgctgctttaagtcgattcacaggagcaacaatatttgaggaatatgccagaaaagctcttgattttctctgggaaaaaagacagcgaagtagtaatttagtgggcgtgactataaatattcatactggagattgggtacgaaaagatagtggagttggagcagggattgattcatattatgaatatctgttgaaagcctatgtcttgcttggagatgacagttttctggaaagatttaacacacactatgatgccataatgaggtatattagccagccacctcttctacttgatgtgcatatccacaaaccaatgctgaatgctcggacttggatggatgctttgcttgccttcttcccaggcttgcaggtgttaaagggggatattagacctgctattgaaactcatgaaatgttatatcaggtgattaaaaaacacaattttctaccagaggcatttaccacagatttcagagtacactgggctcaacatcctttaaggccagaatttgcagaaagtacctacttcttatataaagctacaggagatccttactaccttgaagtagggaagacacttattgaaaatttaaataaatatgctagagtgccttgcggatttgctgccatgaaggatgttcgtactggaagtcatgaggacagaatggattctttcttcttggctgaaatgtttaaatatctttacctgttatttgctgataaagaagacattatttttgacatagaagattacatctttacaacagaagctcatctgttacctctttggctctctactacaaatcaaagcatctctaaaaagaacacaacctcggaatatacagaactggatgacagtaacttcgattggacttgtccaaatactcagatcctctttcctaatgacccattgtatgctcaaagtattcgtgagcccttgaaaaatgtggtggataagagctgtcctagaggcatcatcagagtagaggagagtttcaggagtggagctaaaccccctctgagagccagagatttcatggccactaaccctgagcatttagaaatcctgaagaagatgggggtgagtttgattcacctcaaagatgggagagtccagttggtccaacatgcaatccaagctgctagttcaatcgacgctgaagatgggttgaggttcatgcaggagatgattgaattgtcaagtcagcaacaaaaagaacagcagctgcctccacgagctgtacaaattgtttcccacccattttttggcagggtagtattgactgctggaccagctcagtttgggctggatctgtctaaacataaagagacaagaggatttgttgcaagcagtaaaccatccaatggttgttcagagcttactaacccagaggcagtgatgggaaaaatcgcactgatacaaagaggacagtgcatgtttgcagaaaaggcacgcaacatccagaatgctggagccattggtggcattgttattgatgacaatgaggggagcagcagtgatactgcccctctgttccagatggcaggtgatggaaaggatacagatgacatcaagatccccatgctgttcttattcagcaaagaaggaagtatcatactggatgccatccgggaatatgaggaggtagaagtgctcctctctgataaagcaaaagatcgagatcctgaaatggaaaatgaagaacaaccatcctctgaaaatgattctcagaatcagagtggtgaacagatttcatcaagttctcaggaggttgatttggttgatcaagagtcttctgaggaaaattctctaaattctcacccagaatcattatctctagcagatatggacaatgctgcaagcatttccccttctgaacagacttctaatcccacagaaaaccatgagactacaaatcttaatggtgaatgtacagatttagataaccagcttcaagaacaatcagaaactgaggaagattccaatcctaatgttagctggggtaaaaaggtccagcctatagactccatattagcagactggaatgaagatatagaagcatttgaaatgatggagaaggatgagctatgacttgctaaacaatctgttggtaggtatttaaaaagaaaaggtaaactgtgtgtggttaatagacatcctaatactaagcaggctttctaatgggaggctttaagtatggtgatgaacaaccacgttctgactggcgtagttatcgtaggaatctggagcatgctgtgttagaattgaccttgtttaaaactgtcccatcaaaaatggaaatccacagttcccccttcaaatgcagcactgcaccaccctgcaacacctcaggccagggaaagattactgagcattcctgcgaaccagatttctgttgtctctggatagacaagaaacaaaattcatttagtagtggagtggggaataggagtttggatagccttctaattaaaggaagctcgcctttcttggttttgggggttagaggctcttttgggaagatgcatccgagtattgtggcattctgattatgctgccttcacaaaacactctaagtgacctaagtggttatgaagcaaatgcatttatggtgaaaacagtctttgctcattgctttctcttgtttcatttagtgacaaatgatcaagatgacttgattttttttccttcttaacaatgtcttttttatttaaaccaaaggtgaagccagtgtactttctcagtgagttctctgcataaagactaatcagtgggaccaggtaaaaaggtcatataatacattgtggagattgcttacttaatacttctgaaaaatggagtaagggagaaactgtaatgttgcaatatgaacctcccattgggccttccatagggaaagctgtgactactctgaaatggaacctagcattatatccttgtagggtagattataaatcatttccagttcatttctcttagaggtgattacctctagccatcagccttactccatcccatgtttggtatgcaatttgagccacaaggctcgtatcgccaacagctatatacattttgttccatttttctgtcttacagagccatgataaaactgtggttagtgagttaaaattcctggagtaactactgtttttctcctttgaaacttaggtttctaaagttgcacctaaggaatctgtcacattttctgttgaatcatggtttttgtttttgtttttaacagatattccttctgatacggacttgaaaattagtgtatggtgacctgtgtttaaaaaaaaaagtacaatacaactacatatagctatatagcttaatgagacttccacccccccccccttttttttttggtttgttgttgttgtagtagtctggtgctggccacatttaagtcttaaaaatttttaaattttgttgttgatgtttgtacacagccctgttgttgaaatcatggctttattcattttatttattttttaaacttgcctgaatttgttctaaaggaatatttaagagacataattttcttctctttaccataacattacacaaaactttttcctaaaacacggttgtgaggtactgatgaggtgtaagtggagctgttaaaaacagcagtgctgtattgcagttatgtatattcgtgtacagtatgtttagatcccaggtaaacatattcttttctgagaggataaatacctgcattcagatattccaggtaaatataattgagtcagggagtagtaaatctgatggagaattcactttggggaggggaaaaagaatagtatgcaagacccttattggcttttaattatacctgaaaccaaaatggatatttttagtctctctgcatgtgagatttggtgtaacaagatagaactataatatatacagtatatggaaggatagatatagtgctttgttcattttaattgcaaagctgccaaaatagttgaagcttaattacttgacttgccttgatttataggactggggcttggagaaaatgagcagatgttcctctaagacatcgattacagaagccttatatacatggatttgattttgtatttgtagctgaaagtcactgttgtctaaaactaacttttctaagttatcaaaacaacctaatttcttttccaacaaggagaacttaatggcatgaaggattgtgtgacacattggaaaagccagcttactgccactctcttcctttggccattagagggaggtgttgcctttcattgacgcttagaagcaaattgttcacttgttaagaaaagtaaatccttaaaaaaagaaaaggaaaaaatttaaccaatttttcttaatacccagaaggaattatactcaatatttccctagttaagaaaagaggagataatgttcgtctaaaaaactccaacgttgtaattacaactctacattcatttacttacttgacatactgccacaaagtagtttttgagttcattaaaaattccaaaggcattagttgtttttttttttttttagtgttttgttttttagttaacttttatagacattttagtaacttgctaaagattcaggggattctatgaaccccgaatttagaaacatctggtctacctcagttaaatgttgactgcttagaaatatagctgaagtgatcaccacagccataaaattgtttaagaaagatttatataatgtttacaaatctggaatcaaggattttagctgaaatcctttaagagatattagagcaagtatttaattcaggtattttcaagttttaaaacttaacctgtttacctacttaaaaataaaatagctagtttttttctgcatataaaagttcattgaaatgatatgcccttatttgcaatacttttcccataaagttttaagtgtgaaagaattgtaatttactagatatgtttggtatgggatattttgttaggcaagttttcttttttcttcttaaattgcaataggcttccaaaaagagtataattgtttcagaacaaattaactcttggcattatacgtctccctttttctttacagtattagtaaaaagaaaaattgtacactttctgattttaacttcactaatgtaattactctctcaagaagcttttaaaatttaaattaccatcacacaaccttttttatagtaaagccaacatttgttctctcaccaaaccccatgccaaattcatcatgaagaaagctcagcataagtaattcaaatactgcttataattttagaggggggtagaatttagtaaatattccagccggtcgttttatgcacaaggcttcagtcagaacatagaaaaaaaaaacattctgtgaatgaaatattgtatgttcagattttataaaagacatttttaaaagcccaatttacagccgtatattttcttatgatgtaatttatgaaaaagatgtctgtactaacaggtgctgtaacactactgttgttggattttattgtttggtgataaatgtatacaatatttctaagggaaactatgtactgtgatgtaaaagtctgggcaaaatgtatataatcctgtatataattatgtatttgattataattactgattgtaaagatttaataaaatatgtaaatattccaaaaaaaaaaaaaa

SEQ ID NO: 518 - protein, 889 aa, Human
MSREEKQKLGNQVLEMFDHAYGNYMEHAYPADELMPLTCRGRVRGQEPSRGDVDDALGKFSLTLIDSLDTLVVLNKTKEFEDAVRKVLRDVNLDNDVVVSVFETNIRVLGGLLGGHSLAIMLKEKGEYMQWYNDELLQMAKQLGYKLLPAFNTTSGLPYPRINLKFGIRKPEARTGTETDTCTACAGTLILEFAALSRFTGATIFEEYARKALDFLWEKRQRSSNLVGVTINIHTGDWVRKDSGVGAGIDSYYEYLLKAYVLLGDDSFLERFNTHYDAIMRYISQPPLLLDVHIHKPMLNARTWMDALLAFFPGLQVLKGDIRPAIETHEMLYQVIKKHNFLPEAFTTDFRVHWAQHPLRPEFAESTYFLYKATGDPYYLEVGKTLIENLNKYARVPCGFAAMKDVRTGSHEDRMDSFFLAEMFKYLYLLFADKEDIIFDIEDYIFTTEAHLLPLWLSTTNQSISKKNTTSEYTELDDSNFDWTCPNTQILFPNDPLYAQSIREPLKNVVDKSCPRGIIRVEESFRSGAKPPLRARDFMATNPEHLEILKKMGVSLIHLKDGRVQLVQHAIQAASSIDAEDGLRFMQEMIELSSQQQKEQQLPPRAVQIVSHPFFGRVVLTAGPAQFGLDLSKHKETRGFVASSKPSNGCSELTNPEAVMGKIALIQRGQCMFAEKARNIQNAGAIGGIVIDDNEGSSSDTAPLFQMAGDGKDTDDIKIPMLFLFSKEGSIILDAIREYEEVEVLLSDKAKDRDPEMENEEQPSSENDSQNQSGEQISSSSQEVDLVDQESSEENSLNSHPESLSLADMDNAASISPSEQTSNPTENHETTNLNGECTDLDNQLQEQSETEEDSNPNVSWGKKVQPIDSILADWNEDIEAFEMMEKDEL

SEQ ID NO: 519 - DNA, 5534 bp, Human
gtgggccgttgaatgtggctgctcgcggtcggcgtgccccgacgtacagcgggccgggaaaagtggcactgaggctctggaacttctgcccagctctccttgtaaaatgaatgaaagtaaacctggtgactcacagaaccttgcttgtgttttctgtcgaaaacatgatgactgtcctaataaatacggagaaaagaaaactaaggagaaatggaatctcactgtacattactactgtttgttgatgtcaagtggaatttggcagagaggcaaagaagaagaaggagtttatggttttctaatagaagatatcaggaaggaagtgaatagagcttctaaactgaaatgctgtgtttgcaagaaaaatggtgcttcaattggatgtgttgcaccccgatgtaaacgaagttatcatttcccatgtggacttcagagagaatgtattttccagtttactggcaattttgcgtcattttgttgggaccatcgacctgttcaaataattacatctaataattatagagagtccttaccatgcaccatttgcttggaatttattgagcctattccaagttataacatattacgaagtccttgttgtaagaacgcttggtttcatagagactgtttacaggttcaagcaataaatgcgggagtgtttttctttaggtgtacaatatgcaataatagtgacatctttcagaaagagatgttgagaatgggaattcatattcctgaaaaagatgcttcctgggaattagaggaaaacgcttatcaagagcttctgcagcactatgagcgttgtgatgttcgaagatgtcgttgcaaagaagggcgagactataatgcacctgatagcaaatgggaaataaagcgctgtcagtgttgtggttccagtggcacacatttagcctgctcctcattacggtcatgggagcaaaattgggagtgtttggaatgtaggggtattatctacaattcaggagagttccaaaaagccaaaaaacatgtattacccaattctaataatgtggggattacagattgtttgttggaagagtcatcacctaaattacccagacagtcacctggatcccagagtaaagatctactgaggcaaggcagcaaatttagaagaaatgtatcaacactattaatagagttaggattccaaattaaaaaaaaaactaaaagattgtatatcaacaaagccaatatctggaatagtgccttagatgcattcagaaatcgaaactttaatccttcatatgcaattgaagtagcatatgttattgaaaatgataattttggaagtgagcatcctggatcaaagcaagaatttctgagtctcttaatgcaacatcttgagaactcatcattgtttgaagggtccttgtcaaagaacttgtctctaaattctcaagctctgaaagagaatctttactatgaagctggcaaaatgcttgccatttctttagttcacggtggtccttcacctggtttcttttctaaaaccttgtttaactgccttgtttatggaccagaaaatacccagccaattttagatgatgtttcagactttgatgtggcacagattataatcaggataaatactgcaacaactgtagctgacttaaagtcaataataaatgaatgctataactaccttgagttaattggatgtctcagacttataacgacattaagtgataaatatatgttagtaaaagacatacttggctaccatgtaattcagagagtccacacaccctttgaaagttttaagcagggtctgaaaacccttggtgttttggagaaaattcaggcttatccagaagcattttgtagcatcctgtgtcataaacctgagagtctttctgcaaaaatccttagtgagctttttacagtacacacattacctgatgtgaaagctttggggttttggaacagttacttacaggctgttgaagatggtaaatctacaacaacaatggaagacattcttatttttgcaactggttgcagttccattcctccagctggatttaaacccactccttcaattgagtgtctgcatgtggattttcctgttggaaacaagtgtaataactgtttagcaattcccatcaccaatacatataaagagtttcaagaaaatatggacttcaccataagaaacactctaagactagaaaaggaagaaagttctcattacattggacattaaaatgtttccttgaacaaagagaagcttctttaaaagctgctattgataactctcttttatttcactaaccttttcatcatcactttgaacaaactagttagcttcttgacctaataaaatttatgatatgaatataaaggaatattatagccacttaggctaaaaaaaggttttttttgttaaagcatactagtcaaaattggtgataatttctcattttcttgatatagatacttcataaacctcaatataaatactctcaaaatggttgtatggattttatttaggtatggtagcatggttaataaaagtaaaaactgttttactcacattttttgtaaattaggattacatatagaatgccacaatttctctaggtttattcaattttcaaattattcctcattttattttaaagcattaaatagaaaagctaattggttaaattttgttatataaatcagagtcatatattctgggatttgtgttactatgcatacttttctaggatgtcaccaaattagttgtttaaaatgtttttagattactgatttatattaagatgacccacactgcaattagattatgcctagtgggaagtattatataaaaagcagaattaagctgggcacatgtgcttgtaatctcagttataagggaggctgaggtgggagaatcgagatactcagccagcctggcaatgtagcaaagactccatctcaaaaaaaaaaaacagaattgcacaaattttctggaatctatggacattccatgagcttaaacacttttgaggtggataacatttagttgaaaatacctaagaaagtgtgtcttctttaaagccttggctttaatcatgggaaattgttgttgttgttgttgttgtttgtatcctatgtttggtattctgtatgtctgatccataatcattttagatatttgaatgatctctgtggattggtaggtttggccatttgaccattatttattatcaagttggttgtatgctaaggtaagttgacgccatagcattatacagttatcttcattgctcttgaatgatatctgttatataagcaatgtataaataaagtaaaaaggatagaatgaaaaacccattctaatgtcaccactcagagataagtaccgtatttctgtgtatccttctataaactctttacttctgtttcctttattttttaactttaataatgctactaaaagacaatacctaaaagtaactgtactaacaaagtgctaacaatgtgaaaatatatagtcccatagtcatgtccccatatttatactcccacagaagaaaaaattggaaaacaaagtctgatgtccttaatctattaacatatttaaatgatataatggttcagttttccatgaaagtaaatcattatgggaagtaaaatgttttaaccatatttttcttaatacacaaagcaggtgtcagctgttgtattctcacccttcttaagaaaaatcattacattattgatattttttaagtaacagaatagatttgaaagagataatatatctcttaataccaaaggaaaactaaaacataattctagtgtacttttctttgttccctcatgtctttttcaatctgtacactaacatacctagcaaatttgttttactttaacttgaaatatttaagaacattaaacaagacatttctttggctttggttgaatttttttgtctcaccaatagtaattgaaagatcaattatcaaagagtttgaatagctaatataaaccccaaagtcaccatacagtttttattccaaatatgttgataaaaagatatttgtttctttatccaccttatttttattacagctaaaaaccaatacaaaccaataaaacctagttaaagctattttctggtttttagttgcaattaatttcccctagggtagaaattaaagctgattaagtcacacacacatactttgttggggtgggggtggcaggtggagaggcagtgtacttgggttagctacaattaaaaacagtatttcaattcctcatttgacttattttatatatagacagggccttagtgataagatggtgtaaataatttaggatattcatgttttaaagtgaagcataaatatttattttgcaaaatgttttctagtttgaaggatgttccattattaccatttttagattaatctgtatggtcaaggaatatcagagaaacctgtaggttatttattttctgcagtgtcattttgtcaaatggttggtattataattgttcttttcttattaattttataaccagtgcataattcttacattagattttaaaaaagaattatgctataaatctttataaatgtgtacatatatttcttaaatattgcaattgcctaaatgttgtatattttaaggctgttttctcttgctcttaatgttgaggaaaactataaattgatctataatgcatctactgttaatggttttggttagtttgatattcattgtttttaaacactttccaatatggaaactttaacaccttttatacaattctctactattcaagatattctttaaaatatctcaccagaaacttacaattttatactttgtaatttttagtttctgtaatttgaggaagtgactttttttgtttgggttaagtaaaaagcctttgattgattaccagcatgagaattcaccttggtttctattttatgcatttgtaaatttttcccctaattatatggaagctattggaacttttgtattcagtgctaaatactaagtcaaggggagtatattaggtaagttttttcagtgactgtgcctttagcattcagtcattataagaaaatgatcagaacaaaatcattacattataaacatgtaattcttttatatagtgattatcatgtactgcattgttactttaaaataagctattaaactagtttttatggttcaagtaatgcaatacaaagtttcatgcttcaagtaatgcaatacaaaacataacccatttaatgatgaattacttgaatgtatattatctgtggtttaggaaaatttggattgtcttgaagagacttagttttcaagttctgattttgaccattatctcttctaattcataaacatatcccagtacctacactatgccaggtattatgctaggtgatcgtttatatgtcagcctatttcccccccttttaaagactgccagattaaccaaaaagcgtgacatttataacaatgttttataaataaataaatgtgtttatgccactaaaggt

SEQ ID NO: 520 - protein, 706 aa, Human
MNESKPGDSQNLACVFCRKHDDCPNKYGEKKTKEKWNLTVHYYCLLMSSGIWQRGKEEEGVYGFLIEDIRKEVNRASKLKCCVCKKNGASIGCVAPRCKRSYHFPCGLQRECIFQFTGNFASFCWDHRPVQIITSNNYRESLPCTICLEFIEPIPSYNILRSPCCKNAWFHRDCLQVQAINAGVFFFRCTICNNSDIFQKEMLRMGIHIPEKDASWELEENAYQELLQHYERCDVRRCRCKEGRDYNAPDSKWEIKRCQCCGSSGTHLACSSLRSWEQNWECLECRGIIYNSGEFQKAKKHVLPNSNNVGITDCLLEESSPKLPRQSPGSQSKDLLRQGSKFRRNVSTLLIELGFQIKKKTKRLYINKANIWNSALDAFRNRNFNPSYAIEVAYVIENDNFGSEHPGSKQEFLSLLMQHLENSSLFEGSLSKNLSLNSQALKENLYYEAGKMLAISLVHGGPSPGFFSKTLFNCLVYGPENTQPILDDVSDFDVAQIIIRINTATTVADLKSIINECYNYLELIGCLRLITTLSDKYMLVKDILGYHVIQRVHTPFESFKQGLKTLGVLEKIQAYPEAFCSILCHKPESLSAKILSELFTVHTLPDVKALGFWNSYLQAVEDGKSTTTMEDILIFATGCSSIPPAGFKPTPSIECLHVDFPVGNKCNNCLAIPITNTYKEFQENMDFTIRNTLRLEKEESSHYIGH

SEQ ID NO: 521 - DNA, 2326 bp, Human
aaggatgaaagcctgaactagagcagtggaaatgcgaatgtggagcagaggaacgattcaagaaattctgcggtaaaactcatcagacttcatcactgattaaagattgtcttctcctccaaggtctacatgattacctgaagtttaataataatgcaagaagtgtttgtgggaagcagagaagcaagcaactgtatttcttgttctcacctaagcattactggaggataagccacatcagtctacaaagaggttttcatacaaacataataagatgtaaatggaccaaaagtgaagcacattcttgcagtaagcactgttactctccgagcaaccatggtttacatattgggattttgaaacttagcacttctgctcccaagggacttacaaaagtgaacatttgtatgtcccgtattaaaagtactttgaactctgtttcaaaggctgtttttggcaatcaaaatgaaatgatttcacgtttagctcaatttaagccaagttcccaaattttaagaaaagtatcggatagtggctggttaaaacagaaaaacatcaaacaagccatcaaatctctgaaaaaatatagtgacaaatcagcagaaaagagtccttttccagaagagaaaagtcacattatagacaaagaagaagatataggtaaacgcagtctttttcattacacaagttctataaccacaaaatttggagactcattctactttttatcaaatcatattaattcatatttcaaacgtaaggaaaaaatgtctcaacaaaaggaaaatgaacatttccgggacaaatcagaacttgaagataaaaaggtagaagaggggaaattaagatctccagatcctggcatcctggcttataagccaggctcagaatctgtacatacggtggacaagcctacaagtccttctgcgatacctgatgttcttcaagtttcaactaaacaaagtattgctaactttctttctcgtcccacggaaggtgtacaagctttagtaggtggttatattggtggacttgtccccaaattaaagtatgattcaaagagtcagtcagaagaacaggaagagcctgctaaaactgatcaggctgtcagcaaagacagaaatgcagaggagaaaaagcgtttatctcttcagcgagaaaagattatcgcaagggtgagtattgataacaggacccgggcattagttcaggcattaagaagaacaactgacccaaagctctgcattactagggttgaagaactgacttttcatcttctagaatttcctgaaggaaaaggagtggctgtcaaggaaagaattattccatatttattacgactgagacaaattaaggatgaaactcttcaggctgcagttagagaaattttggccctaattggctatgtggatccagtgaaagggagaggaatccgaattctctcaattgatggtggaggaacaaggggcgtggttgctctccagaccctacgaaaattagttgaacttactcagaagccagttcatcagctctttgattacatttgtggtgtaagcacaggtgccatattagctttcatgttggggttgtttcatatgcccttggatgaatgtgaggaactttatcgaaaattaggatcagatgtattttcacaaaatgtcattgttggaacagtaaaaatgagttggagccatgcattttatgacagtcaaacatgggaaaacattcttaaggataggatgggatctgcactgatgattgaaacagcaagaaaccccacatgtcctaaggtagctgctgtaagtaccatagtaaatagagggataacacccaaagcttttgtgttcagaaactatggtcattttcctggaatcaactctcattatttgggaggctgtcagtataaaatgtggcaggccattagagcctcatctgctgctccaggctactttgcagaatatgcattgggaaatgatcttcatcaagatggaggtttgcttctgaataacccttcggcattagctatgcatgagtgtaaatgtctttggccagatgtgccgttagagtgcatagtatccctgggcactggacgttatgagagtgatgtgagaaacacggtaacatacacaagcttgaaaactaaactttctaatgttatcaacagtgctacagatacagaagaagtccatataatgcttgatggcctgttacctcctgacacctattttagattcaatcctgtaatgtgtgaaaacatacctctagatgaaagtcgaaatgaaaagctggatcagctgcagttggaagggttgaaatacatagaaag

SEQ ID NO: 522 - DNA, 3492 bp, Human
gcaggaaaggcgcgggaggcgggggaggtgcggagatggcgctctgcacggcggcggagggagggcgctggcgccggggacacgaaaccgcagagcccggacgagtcagggagtgaggcgcgagccgggcgcccggggctctgcaggcgcaggcggcgcggggacaggagcaggttaccgggccgcccgagcgctcgcaccccgctgaaagaaacgcaggcggcccgccggctctgcctggtccgctacccgaccagctcccggctcggggctcagagctaggggcttacgccaagcggagcccggggaggggtgcccacctccctccgccgcatcccaagcccggcccccttgatgcgctggcggcctcggccgggaactccggggtagatgaccgtggacagcagcatgagcagtgggtactgcagcctggacgaggaactggaagactgcttcttcactgctaagactacctttttcagaaatgcgcagagcaaacatctttcaaagaatgtctgtaaacctgtggaggagacacagcgcccgcccacactgcaggagatcaagcagaagatcgacagctacaacacgcgagagaagaactgcctgggcatgaaactgagtgaagacggcacctacacgggtttcatcaaagtgcatctgaaactccggcggcctgtgacggtgcctgctgggatccggccccagtccatctatgatgccatcaaggaggtgaacctggcggctaccacggacaagcggacatccttctacctgcccctagatgccatcaagcagctgcacatcagcagcaccaccaccgtcagtgaggtcatccaggggctgctcaagaagttcatggttgtggacaatccccagaagtttgcactttttaagcggatacacaaggacggacaagtgctcttccagaaactctccattgctgaccgccccctctacctgcgcctgcttgctgggcctgacacggaggtcctcagctttgtgctaaaggagaatgaaactggagaggtagagtgggatgccttctccatccctgaacttcagaacttcctaacaatcctggaaaaagaggagcaggacaaaatccaacaagtgcaaaagaagtatgacaagtttaggcagaaactggaggaggccttaagagaatcccagggcaaacctgggtaaccggtcctgcttcctctcctcctggtgcattcagatttatttgtattattaattattattttgcaacagacactttttctcaggacatctctggcaggtgcatttgtgcctgcccagcagttccagctgtggcaaaagtctcttccatggacaagtgtttgcacgagggttcagctgtgcccgcccccaggctgtgccccaccacagattctgccaaggatcagaactcatgtgaaacaaacagctgacgtcctctctcgatctgcaagcctttcaccaaccaaatagttgcctctctcgtcaccaaactggaacctcacaccagccggcaaaggaaggaagaaaggttttagagctgtgtgttctttctctggcattgattcctctttgagttctcttacttgccacgtacaggaccattatttatgagtgaaaagctgtagcacattccttttgcaggtctgagctaagcccctgaaagcagggtaatgctcataaaaggactgttcccgcggccccaaggtgcctgttgttcacacttaagggaagtttataaagctactggccccagatgctcagggtaaggagcaccaaagctgaggctggctcagagatctccagagaagctgcagcctgccctggccctggctctggccctggcccacattgcacatggaaacccaaaggcatatatctgcgtatgtgtggtacttagtcacatctttgtcaacaaactgttcgtttttaagttacaaatttgaatttaatgttgtcatcatcgtcatgtgtttccccaaagggaagccagtcattgaccatttaaaaagtctcctgctaagtatggaaatcagacagtaagagaaagccaaaaagcaatgcagagaaaggtgtccaagctgtcttcagccttccccagctaaagagcagaggagggcctgggctacttgggttccccatcggcctccagcactgcctccctcctcccactgcgactctgggatctccaggtgctgcccaaggagttgccttgattacagagaggggagcctccaattcggccaacttggagtcctttctgttttgaagcatgggccagacccggcactgcgctcggagagccggtgggcctggcctccccgtcgacctcagtgcctttttgttttcagagagaaataggagtagggcgagtttgcctgaagctctgctgctggcttctcctgccaggaagtgaacaatggcggcggtgtgggagacaaggccaggagagcccgcgttcagtatgggttgagggtcacagacctccctcccatctgggtgcctgagttttgactccaatcagtgataccagaccacattgacagggaggatcaaattcctgacttacatttgcactggcttcttgtttaggctgaatcctaaaataaattagtcaaaaaattccaacaagtagccaggactgcagagacactccagtgcagagggagaaggacttgtaattttcaaagcagggctggttttccaacccagcctctgagaaaccatttctttgctatcctctgccttcccaagtccctcttgggtcggttcaagcccaagcttgttcgtgtagcttcagaagttccctctctgacccaggctgagtccatactgcccctgatcccagaaggaatgctgacccctcgtcgtatgaactgtgcatagtctccagagcttcaaaggcaacacaagctcgcaactctaagatttttttaaaccacaaaaaccctggttagccatctcatgctcagccttatcacttccctccctttagaaactctctccctgctgtatattaaagggagcaggtggagagtcattttccttcgtcctgcatgtctctaacattaatagaaggcatggctcctgctgcaaccgctgtgaatgctgctgagaacctccctctatggggatggctattttatttttgagaaggaaaaaaaaagtcatgtatatatacacataaaggcatatagctatatataaagagataagggtgtttatgaaatgagaaaattattggacaattcagactttactaaagcacagttagacccaaggcctatgctgaggtctaaacctctgaaaaaagtatagtatcgagtacccgttccctcccagaggtgggagtaactgctggtagtgccttctttggttgtgttgctcagtgtgtaagtgtttgtttccaggatattttctttttaaatgtctttcttatatgggttttaaaaaaaagtaataaaagcctgttgcaaaaaaaaaaaaaaa

SEQ ID NO: 523 - DNA, 1776 bp, Human
agaatcttcagtttctgtgagcgtccgcttcgtctgggcacttccggtactcccattcagttccggtccctgtcttttacgtttccggcaaaacatcagtgtctgtgggtagttggaatcttcagttcctgtgagcgtcggcgtcttctgggcctgtggagtttcttggacaggggccgcggggctccaggacggcgcccttagcgacaccatggcccgaaatgcagaaaaggccatgacggccttagcaagatttcgccaggctcagctggaagagggaaaagtgaaggaacgaagaccctttctggcctcagaatgtactgaactgcctaaagctgagaagtggagacgacagatcattggagagatctctaaaaaagtggctcagattcagaatgctggtttaggtgaatttcgaattcgtgacctgaatgatgaaattaacaagctgctaagggagaaaggacactgggaggtccggataaaggagctgggaggtcctgattatggaaaagttggccctaaaatgctggatcatgaaggaaaagaagtcccaggaaaccgaggttacaagtactttggagcagcaaaagatttgcctggtgttagagagctgtttgaaaaagaacctcttcctcctcccagaaagacacgtgctgagctcatgaaggcaatcgattttgagtactatggttacctagatgaagatgatggtgttattgtgcctttggaacaggaatatgaaaagaaactcagagccgagttagtggaaaagtggaaagcagagagagaggctcggctggcaagaggagaaaaggaagaggaggaggaagaggaggaagagatcaacatctatgcagtcaccgaggaggagtcggacgaggaaggcagccaggagaaaggaggggacgacagccagcagaagttcattgctcacgtccctgttccctcgcagcaagagattgaggaggcactggtgcgaaggaagaaaatggaactcctccagaagtatgcaagcgagaccctgcaggcccaaagtgaagaagccagaaggctcctggggtattaggacccagctggggctctccttggagttcttccatcccccagtggtacctcaggacccagggctgcagacacaggctggtgctgcaagggctcctgccccattctcagccttccttccctctccttgtctcatgttgaccggagggtaggggtctgtccctggtcttcctggtaggttttgtacacatattttgctactgtgtggatccatttatttttattgtggagtgtatacaacaggttgcgaactggctgcctgtgtcttattttgacttgcactgccattttgaggggagaagaatcaattagtggcaaacatttaaaaatgcaattttttgcagaccaaagtataattttaaaaaatgcaaattttctaaaagacacatctcttgaaaaatgagatgatgtggccaggcgcagtggctcacgcctgtaaccccagcactttgggaggccgaggcgggcgggtcacgaggtcaagagatggagaccatcctggccaacatggtgaaaccccatgtctactaaaaatacaaaaaaattagctgggcgtactggcatgcacctgtagtcccagctgcttgggaggctgaggcaggagaatcacttgaacccgagaggtggaggttgaagtgagccaagatcgtgccattgcactccagcctggcgacagagtgagactctgtcccacaaaaaaaaaaaaaaaaa

SEQ ID NO: 524 - protein, 285 aa, Human
MARNAEKAMTALARFRQAQLEEGKVKERRPFLASECTELPKAEKWRRQIIGEISKKVAQIQNAGLGEFRIRDLNDEINKLLREKGHWEVRIKELGGPDYGKVGPKMLDHEGKEVPGNRGYKYFGAAKDLPGVRELFEKEPLPPPRKTRAELMKAIDFEYYGYLDEDDGVIVPLEQEYEKKLRAELVEKWKAEREARLARGEKEEEEEEEEEINIYAVTEEESDEEGSQEKGGDDSQQKFIAHVPVPSQQEIEEALVRRKKMELLQKYASETLQAQSEEARRLLGY

SEQ ID NO: 525 - DNA, 1546 bp, Human
aaaggcgtgagcgcgcgtgcgtgcgtgtgcgggtgcgtgagcgtgagcgcgcggaggccggaagcgagcgctgcgcagtcgggtggtcgcgggccatggagggtagcttttcggatggcggagcgctgccggaggggctcgcggaagaggccgagccgcagggcgccgcctggagcggggacagtggcactgtttcccagagccacagcagcgcctcggggccgtgggaggacgagggcgcggaggacggcgcgccgggccgcgacctgccgctgcttcgccgcgccgctgcgggctacgccgcctgcctgctgcccggggccggggcgcggcccgaggtcgaggccctggacgcgagcctagaggacctgcttaccagagtggacgagttcgtgggcatgctggacatgcttcgcggcgactcgtcccacgtcgtcagcgagggcgtgccgcgcatccacgcgaaggccgccgagatgcggcgcatctacagcaggatcgaccggctggaggccttcgtgaggatggtggggggccgcgtggccaggatggaggagcaggtcaccaaggccgaggccgagctgggcaccttccccagggcgttcaagaagctcctgcacacgatgaacgtgccctcgctctttagcaagtctgctccctcgaggccacagcaagccggctacgaagcccccgtcctgtttcggaccgaagactacttcccttgttgcagtgaaaggcctcagctctgacggcctgaccactgcggcaagaggaccccagctggggtgcttacctccagtatgaagtgaattgcaaatcctgcttatggacatatatgatgttggagtgtgggattttaaagtttactttctacaaactctccgtagtatattcatgattcagtgtagaatgtatagactttatgtcttccaagtttaaaaaaagagacagggtcttggtatgttgcccagactgttcggaaactcctgggctcaagtgatccttccacctcagcctccccagtagctgggactacggggtcgccactgcacccagcctgtgtcttccagctctaatcagaaagctgcttgtcgagggcatggggaatcaaactgaatgaacttttctctgcactgtggcaaaactgttatttttatggattttactaaatggcgttaccttttcaagatttatatgtttgtataatcataagaaaattgagccattaaagccttgttattcaatcctaatagtcagttttctagaacctacttttagggtaaatggtacattatttaatattatattaaacctcctatagcgtggattgtagaccaaaggaaatggtacaatttctgagaatatatgttgattttttgtgactaattccaaagttgtatttgaaagtatgacctcacagtcttcatttgtccatagcaaacatatgtgtgtgtgtgtgtatatatatatgtgggttgccaatgtttggtttataatttaaatgttaatagaaattttgagttttattggaaatgatttccttctg

SEQ ID NO: 526 - DNA, 2256 bp, Human
cacgcggcaggcggtggcgggattctgccgcgtgcgctttcccgccccgcctcgcctagcctcgtcctgcgctcgccacgcctcgggctgtccgttgggccacgcagaccgcgctgcgctcgctccgtcgcggctccgcgtgccccaccttctggctagttttttctagagcccaggctccgcccgtttcccgcttccagggcccggttcgttcccgcccgcacccgtccctctcctctgcacccctgctgcttctgctttgaaggcggaggctccatgttgtcccctcagcgagtggcagcagctgcctcaagaggagcagatgatgccatggagagcagcaagcctggtccagtgcaggttgttttggttcagaaagatcaacattcctttgagctagatgagaaagccttggccagcatcctcttgcaggaccacatccgagatcttgatgtggtggtggtttcagtggctggtgccttccgaaagggcaagtccttcattctggattttatgctacgatacttatattctcagaaggaaagtggccattcaaattggttgggtgacccagaagaaccgttaacaggattttcctggagagggggatctgatccagaaaccactgggattcaaatctggagtgaagttttcactgtggagaagccaggtgggaagaaggttgcagttgttctgatggatacccagggggcatttgacagccagtcaactgtgaaagactgtgctaccatctttgctctaagcactatgactagttctgttcagatttataatttatctcagaacattcaagaagatgatcttcaacagctgcagctcttcacagaatacggtcgtctggcaatggatgaaattttccaaaagcctttccagacactgatgtttttggttagagattggagtttcccttatgaatatagctatggactccaaggaggaatggcatttttggataagcgtttacaggtgaaggaacatcaacatgaagaaattcagaatgttcgaaatcacattcactcatgtttctccgatgtcacctgctttctcttaccacatccaggactccaggtggccacaagccctgactttgatgggaaattaaaagatattgctggtgaattcaaagagcagttacaggcactgataccgtatgtattaaacccatctaagttaatggaaaaggagatcaatggctcaaaggtcacctgtcggggactactggagtattttaaggcatatattaaaatttatcaaggagaagatctgcctcaccccaagtccatgcttcaggccactgctgaagccaacaacttagcagctgcagcctctgccaaggacatttattataacaacatggaagaggtttgtgggggagagaaaccttatttgtctccagacattctagaggagaagcactgtgaattcaaacaacttgctctggaccattttaagaagaccaagaagatgggtgggaaggatttcagctttcgttaccagcaggagctggaggaggaaatcaaggaattatatgagaacttctgcaagcacaatggtagcaagaacgtcttcagcaccttccgaacccctgcagtgctgttcacgggcattgtagctttgtacatagcctcaggcctcactggcttcataggtcttgaggttgtagcccagttgttcaactgtatggttggactactgttaatagcactcctcacctggggctacatcaggtattctggtcaatatcgtgagctgggcggagctattgattttggtgccgcatatgtgttggagcaggcttcttctcatatcggtaattccactcaggccactgtgagggatgcagttgttggaagaccatccatggataaaaaagctcaatagcatcttaacgtgaagatcaaacaagaacacaacaagcccctactgatttctgggtttctgccacggccacaggttcatatccagaggaatggcagatctgagacgatccaggaagagctaaaacatggccctgtaataaatgagcagacctctcctgtggtttcaaattattaaacacacttccatttctcttggaagcatttcttttccttgctgttatagatgcaagcctgtgtctattttcatattactctgctttgtgcactttatggaggaggaagctagaggaaaaatggaaatgcagcttttaagttctttatgtgccacttagtgccttttaagattgattccatg

SEQ ID NO: 527 - DNA, 5536 bp, Human
  unsure 167: unknown base
  unsure 168: unknown base
  unsure 169: unknown base
  unsure 170: unknown base
  unsure 171: unknown base
  unsure 172: unknown base
  unsure 173: unknown base
  unsure 174: unknown base
  unsure 175: unknown base
  unsure 176: unknown base
  unsure 177: unknown base
  unsure 178: unknown base
  unsure 179: unknown base
  unsure 180: unknown base
  unsure 181: unknown base
  unsure 182: unknown base
  unsure 183: unknown base
  unsure 184: unknown base
  unsure 185: unknown base
  unsure 186: unknown base
  unsure 187: unknown base
atagtgggccaggcaggaagatggcggcggtagcggaggtgtgagtggacgcgggactcagcggccggattttctcttcccttcttttcccttttccttccctatttgaaattggcatcgagggggctaagttcgggtggcagcgccgggcgcaacgcaggggtcannnnnnnnnnnnnnnnnnnnnacggctggaagggtaggcttcattcaccgctcgtcctccttcctcgctccgctcggtgtcaggcgcggcggcggcgcggcgggcggacttcgtccctcctcctgctcccccccacaccggagcgggcactcttcgcttcgccatcccccgacccttcaccccgaggactgggcgcctcctccggcgcagctgagggagcgggggccggtctcctgctcggttgtcgagcctccatgtcggataatcagagctggaactcgtcgggctcggaggaggatccagagacggagtctgggccgcctgtggagcgctgcggggtcctcagtaagtggacaaactacattcatgggtggcaggatcgttgggtagttttgaaaaataatgctctgagttactacaaatctgaagatgaaacagagtatggctgcagaggatccatctgtcttagcaaggctgtcatcacacctcacgattttgatgaatgtcgatttgatattagtgtaaatgatagtgtttggtatcttcgtgctcaggatccagatcatagacagcaatggatagatgccattgaacagcacaagactgaatctggatatggatctgaatccagcttgcgtcgacatggctcaatggtgtccctggtgtctggagcaagtggctactctgcaacatccacctcttcattcaagaaaggccacagtttacgtgagaagttggctgaaatggaaacatttagagacatcttatgtagacaagttgacacgctacagaagtactttgatgcctgtgctgatgctgtctctaaggatgaacttcaaagggataaagtggtagaagatgatgaagatgactttcctacaacgcgttctgatggtgacttcttgcatagtaccaacggcaataaagaaaagttatttccacatgtgacaccaaaaggaattaatggtatagactttaaaggggaagcgataacttttaaagcaactactgctggaatccttgcaacactttctcattgtattgaactaatggttaaacgtgaggacagctggcagaagagactggataaggaaactgagaagaaaagaagaacagaggaagcatataaaaatgcaatgacagaacttaagaaaaaatcccactttggaggaccagattatgaagaaggccctaacagtctgattaatgaagaagagttctttgatgctgttgaagctgctcttgacagacaagataaaatagaagaacagtcacagagtgaaaaggtgagattacattggcctacatccttgccctctggagatgccttttcttctgtggggacacatagatttgtccaaaagccctatagtcgctcttcctccatgtcttccattgatctagtcagtgcctctgatgatgttcacagattcagctcccaggttgaagagatggtgcagaaccacatgacttactcattacaggatgtaggcggagatgccaattggcagttggttgtagaagaaggagaaatgaaggtatacagaagagaagtagaagaaaatgggattgttctggatcctttaaaagctacccatgcagttaaaggcgtcacaggacatgaagtctgcaattatttctggaatgttgacgttcgcaatgactgggaaacaactatagaaaactttcatgtggtggaaacattagctgataatgcaatcatcatttatcaaacacacaagagggtgtggcctgcttctcagcgagacgtattatatctttctgtcattcgaaagataccagccttgactgaaaatgaccctgaaacttggatagtttgtaatttttctgtggatcatgacagtgctcctctaaacaaccgatgtgtccgtgccaaaataaatgttgctatgatttgtcaaaccttggtaagcccaccagagggaaaccaggaaattagcagggacaacattctatgcaagattacatatgtagctaatgtgaaccctggaggatgggcaccagcctcagtgttaagggcagtggcaaagcgagagtatcctaaatttctaaaacgttttacttcttacgtccaagaaaaaactgcaggaaagcctattttgttctagtattaacagtgactgaagcaaggctgtgtgacattccatgttggagaaaaaaagaaaaaaaaaagctgaatgctctaagctggaacgtaggatctatagccttgtctgtggcccaagaccttggccttgtgtacaaaaatgacaaaatattgcaatagcaaagctgaacatctaacactagctatctcttgctagatctccttgctcagcatataactataaatacatgtaaaattacatgtatatggctatatttttatttgcttgctcctagaagagaaaaaaaaatcaactttgaatcacaactaggaattgatgctttaatttttggatactttttgagaatttttaatttactatggtccggcctaagatcctctgttgtatcaggttttgtgcacaaaagaaaagcacaaaagttgaatgcacatggggcatgtgctttctgtgcaccaaatatctggatgaggttcttttttcaggcctacagtcaaatctgtgtccagaattttttgacttttttgctttgtataatcatagaattcattgctgctgatttctataatgattcatgttgtcatgtgtctcttaataactgagggctgtcagtaacctgtgattttgccttttctatagtcttactcccatgaagaaccttggttctgatggagaaagtgaaaagctttatttcttcccctagatatctttatatttctattatattttttagttgtgtactgtgtactagagatttttttcagtttgttatgaacacaatttggtaagccctaaattggttctgcctgtctccaaacagaaacatctgtacaaatcttgttggtatagactactttctggaaaatggtcaagataagttcatgttttcttgaaatttctaagatagtatatggtatcacttgtttaaagcaaatcagactgagtttgacatttaattcaatatttctggtattcagtaacgggtatatatgtttgttcttccagtttgggtcagtttaaaagatatgttgcaaagtatacatagaaaatgtgagcaatgcctctctttgccttttgatcagaaacttcagcagagcggtaaggattccacatgatttaaactgaaatgcttttctttgttgctgtaagaacttaaaatgtaaaatacctttttcagtttaagtcctgtaaacaacattgaagcatggagatgaggcaaggaatagtactcactgaagttgaaatgactgcccacttcaaaatcttcattgtgtttacacaccagtgtatttatacaaatcagaggcattttgtagatgctttgctgacttgttcagctctgtaaaaacacagaaatcagacccattttgtaaagcggaaaatcatgttacatggaacatgtcctgtatatatcacatacatggtaatggagtcttaatgataagtgcaagataataatttaatgatgggattagtctgatcgcttaatatgcacaatcctggaagtgaattacttgcatcagatatagtgatatttattattctgtacagagagaaaaatacatataaaacatatgcttacattacatgcacgcggatttcatgctccataatcttttctattttttaatttacctttctgtaaatgatgtgcatggaatatgccttatagaaaaatgctgttcataatttgactacgtggaaaagtgcctatatggtggtaatgctagtaaggcaaataagacaaattatcatgttggtttactacatcaccagttaacattttatattgtgatgtttaaaaaagaaaaatttatacctcaaatgtgtattttattttacaatcagctgtggggtatggggttgggatgggagaatgggggggttggggagggcaggtttattcaccatagccgctgataagaatcttcaaaaaaattctatatgcgcactataaatgtttctctatatgcgcactataaatgtttctctgtttgccatttctggtaactatcatgaacacagacagttaactctttcataactgaattggatagctttattttacagaagtatggcaagtttacaaagcaatatctaaatctaattatcattagttgcatttggactaaatgtgatgatatacttttgcaattgattctgtaaataaaaggattacactaaaatatttgtattaaaagaagaaaagataacattttacctttagataactgcacttgtacctcactagagttaatcccacccaatcagattgagaaataaattggggaatgtggaaagagtccaaaagaggtcagaatttggagaggtactggccttctggacaacatttagaccctctacaattattttcattaagctgattcctacatcctgaatattcatgttttctcatctacagatatttgtcttcccccaaactaaaagaaaaaaaactaccctttactctcttttctactcagttactcttttgtgctatgttagaaacttgaaatatattggtgatgtggggattttgtccctgactgcccactgtacaggacaagagagtacagtgtttcagttggaattcaggactcctggttttgaggtagaggatgatcactgcagtacttggtttggaattgccacaggggtagctaaaccaaaggagggttatatctgcaagggaggtgtaagaaggcaaaataaggaaaaggaggaatgggttttctatttgttcagtttcatcaactaatttatacacttaatacaacttcagtgtcaattgctattaagaaatttttagttgggctgagctggttctcttgtgaaattgtgctggttatctttaagcttatcagttatttgtccaattaaacacttttcaccagtatttagtccgagttgtacagacgatgtatttggattttgtcatggttcatctacagactcaaaacataatcattttaaagtaccttgggagtgtgtagagtaacttctataatagctttatgatcctgatgatgttttttaaacacaataaagttggatcttccatgttacaatcacagaattaaaaccagtatttaaagtggaaaagtattaaaatattatggacaatatgctggcttgatttgttttccttaaccctgagatattgccctactctgaatagttaagagcttgaaattcagtgttcttcccgtaacccagttagggatcaagaaaactactgagttgc

SEQ ID NO: 528 - DNA, 3302 bp, Human
acgtccccgccgggcccgcgcgcctcgtgcctcgcgcctcgcgcctccagccacgtccccgccccggctccggcgcgccgcggagttggctgctgggaggtgcgggactgggtgtggccggcggctctggtctcggctgtgagctgcgctctccacgccggctccgcgctccaggggctgctgagcgcccagcggacaccggcagcgcgcggtcgacgcgggcctgagctccctccagctgttttcactcattagctcctgaggtaaacaaattgaaaaaatgagcgaactggaacagttgaggcaagaagcagaacaactgcggaatcagattcaggatgctcggaaagcatgtaatgatgcaacgcttgttcagattacatcaaatatggactctgtgggtcgaatacaaatgcgaacaagacgtacactgaggggccacctagctaaaatctatgctatgcattggggatacgattccaggctgctagtcagtgcttctcaagatggaaaattaattatttgggatagctatacaacaaataagatgcatgctattcctttgaggtcctcctgggtgatgacctgtgcttatgctccctctggtaattatgttgcctgtggaggcttggacaacatctgctctatatataacttaaagaccagagagggaaatgtgagagtaagccgagagttgccaggtcacacagggtacttgtcctgctgtcgttttttagatgacagccaaattgttacaagttcaggagatacaacttgtgctttatgggacatcgaaactgcccagcagaccaccacattcactgggcattctggagatgtgatgagtctttctttgagtcctgacatgaggacttttgtttctggtgcttgtgatgcctcttccaaattatgggatattcgagatggaatgtgtagacagtctttcacgggacatgtctcagatatcaatgctgtcagttttttcccaaatggatatgccttcgccactggctctgatgatgccacttgccggctctttgaccttcgtgcagatcaagagttattattgtattctcatgacaatatcatctgtggaatcacttctgtagccttctcaaaaagtgggcgtctcttgttggctggttacgatgactttaattgtaatgtatgggacacgctaaaaggagatcgtgcaggtgtccttgctggtcatgacaaccgtgtgagctgcttaggtgtaactgatgatggcatggctgtggcaacaggctcttgggacagttttcttagaatctggaattaacagtgtcatacatatttgttctccattgatatatctggagaaatcaatgctacagcctatagctgtgaaaaaattctaccttatatttgcaggtgaagatttttctattagattatctacaaaaacaagctttcagtaaactaccaaaaaaaaagtgggggtggaggaaaaaaggcaaaggcgccttctgagatcaaaaggaccagtgtattaatttgaggggttgggttattttaaccttggtgaattgttgtgtgtactcagagtgtattttctttgtgtagaacagaatgtacacattatagcagctcgccattgtgtttgcattttttaagaagtacatttttaactttgtatacacaagaaatgtcatatttttgagttttgtaatggaagaaccaggcacagaaacagacagaaatgatactgtatgtgtgtgtatttatgtctgaagaaagtccccttgaattctgatatctctttgaatctaagagatcctgatagcttcatgtttaagagcattgacaggtggggcacctctgaggggagttcattgtttctcatgcatcatttgccatatactattaatcaaagtgcttgctttcagtcctttgaggggacagataatctgaaggccagagattagagatttcactgatattttggacatacataagaaacatcattataattaataaaaagtaggtaatagcatataaatggttcttgacattttaaaagcctggttatgatcagttgacactttgagtacccccctaaatagctggactttccttttcatttcatatttggaactaagtttgtagcgtatactcatctttcagaagtttggtaaacattgggattgtccctgcatctgaacatctttcccagtgctatcagtatacatctagagaggaaatgcaatgtgacagtgttacatttggagagaagtgtgaaatctaaccaatcgctagcacatatttgttgtaatacggtggtttatttcatgtttgcatactataaaatctgaattgatgtgaaatatctgtgcctttaaatttcttaaacctttaagctttttgttctgttttgcaacattttgtagtatttcttcccttccttagcacaaaatactggtttctaagtggttttgcttcaaaggatgtctagatgtaagtgattccacttaaagccaaaataaaaattcctaaagcagttcttaaaggagttagagagctatattaaacagtttttctgtggtataataatgtgtctcttactagaagtcccccacgaccaagttaaagatacttttcctgttggattctcttttacaaataagtctaaatgactgataatagaagattgttagtcttgcttgatggtaaagtcttggattattctgatatatagacgtgcattgttttgtaacttagttacttttcagataggtctgtgttaacttttgaacatgtgtaacttaacctaaatactcccaaactttacctctaaatttttgtttttatgttgtgaatgtgctaatatgtgcatcaactgtaaagatgtatcagttttattaaaatcagttgacaattagaataataaagtggataaaggcaaattaagatataggaccaaaacagaatattgtagatggcagttatgaatgtatatttatattttgattaagatttctattaactttttggctgggcagagtggcttacacctataatcccagcaatttgggaggccaaggtgggcagatcacttgaggtcaggagttcgcgaccagcctacccaacatggtgaaaccccatctcttctaaaaatacaaacattagccgggcgtggtggcacattcctgtaatcccagctactcgggaggctgaggcaggagattcgcctgaacccgggaggcagaggttgcagtgagccgagattgtgccactgcactccagcctaggcgacagagtgagactccatctcaaattgg

SEQ ID NO: 529 - protein, 340 aa, Human
MSELEQLRQEAEQLRNQIQDARKACNDATLVQITSNMDSVGRIQMRTRRTLRGHLAKIYAMHWGYDSRLLVSASQDGKLIIWDSYTTNKMHAIPLRSSWVMTCAYAPSGNYVACGGLDNICSIYNLKTREGNVRVSRELPGHTGYLSCCRFLDDSQIVTSSGDTTCALWDIETAQQTTTFTGHSGDVMSLSLSPDMRTFVSGACDASSKLWDIRDGMCRQSFTGHVSDINAVSFFPNGYAFATGSDDATCRLFDLRADQELLLYSHDNIICGITSVAFSKSGRLLLAGYDDFNCNVWDTLKGDRAGVLAGHDNRVSCLGVTDDGMAVATGSWDSFLRIWN

SEQ ID NO: 530 - DNA, 4543 bp, Human
tgcatggtgaatatagaacagtggtttataaaagccaggctggtaccgcccggaatcccgggatatcccggcgctgccgggtgaaatcgtaggacagtgaagatgctgctggaattgtccgaggagcataaggaacacctggccttcctgcctcaagtggacagcgcggtggtcgccgagtttgggcggattgctgtggaattcctgagacgcggcgcaaacccaaaaatctacgaaggcgccgccagaaaactcaatgtgagtagtgacactgtccagcatggtgtggaaggattaacgtatctcctcactgagagctcaaagctcatgatttctgaactggatttccaagactctgtttttgttctgggattctctgaagaattaaacaaattgttgcttcagctttatctggacaacagaaaagagatcagaacgcttctgagtgaattggcaccaagccttcccagttatcataaccttgaatggcgactagatgtacagcttgcaagtagaagtctcaggcaacagattaaaccagcagtgactataaagctacaccttaatcaaaatggagatcacaacaccaaagttctgcagacagacccagccaccctgctccatttggttcaacaactggaacaagcattggaagagatgaagacaaaccactgtaggagagttgttcgcaacatcaagtagtaccagttttaaggttttaattcatttgaatcacttatgaattgatgatatacagcaattacttttcaaaattaattttttattaattcatgatgataaatacatagtattcctcagtatctattccaagatactgaggtcataatcagaagctaagctgggtgcagtggctcatgccagttatcccagcactttgggaggccgaggtgggcaaatcatgaggtcaggagattgagaccttcctggctaacatggtgaaaccccatctctactaaaaatataaaaaattagccaggtgtggtggcacgcatctatcagagtcccagctactcaggaggctgaggcaggagaatcgcttgaacctgggaggtggaggttgcagtgagctgagattgtgccactgcactccagcctgggtgacagagtgagactccatctcaaaaataataatcataataataaagtaaaaataaaaataaaaaagtaatcagaagctaaagtaaagttcctttcctggtgctaactgtggtcttcttgacacattaagatgtattttgtattttaagagtctcatgctctaccgttggaactagccagatggccattattttgtattttaaatacataaataggattgaatcaactagaaatgaatctatatgttctgtatatatgaatgactatcttgtttttgctacttcttttgactgcttaattttattattttcatctttattgatcaaatttgaaaataaaattcacaatgtaatactactactatgcagaattttctaaacagttcagtatttttgacttttaaaaacaccccacagtgttaatagccacagaatattgaacatcaataggatttttaatgctatattgttataggcagtttattcatttttctttgtatatgagatcgatagtatatgaagatgataagtatcatattgcctaagtttgagtgatcatggttaattaattggcttaaatagtactcaaatttgtgtggtcgtatattgtattttatcaaggactaattcttccaccatacccaaagcatctaggagacactctgtcatttacatttacaaataatggatgcagagaaatataatcaattcttgattgtcctggatacaaattatagtcactttttataatttgaataaactatgatgagggaaggaaggccatgtttattacattataggcaactatcccttctcaaaacataacttgatttatgttttgttttattttttagtagggaaccaaaagcttttggtctgaaaaactcaggtgctgatttgtcaggtcagcctgagagagtgcagagatactgaggtcagcttagggagaagaattgtatggaagggtggaaatgagggttcagtcttaactatgtgtccaagaccttatcctgagagtcttcatggaataatctagaaagggctgtagaagcaatcaaactctaaactgcgctctagactttgtcaatactttgcttcgtaagaattagggattttcatatcagagtgataccatgttgcaatctctttagagaagagagagcctagcagggaataggctagtggaagaaaaacatacttgagatggttacccattggtccctgcaggcatctgggccacccttttcctgtaggtatatattctgccgttgtgaaacaactatattattagatgtcagcaaactataatcagaaataatttttaattatagtggcaacttgattaatgaagctctcatatacaacctcacaaacaaaaagaaactttattacgtgaaatagtagcatatgtcattgggtttaaaagcaacatgcctgcaaaacatatgataaaaaatacctctgtaagggtttttatttgtccaccttcgatggaaggtaaacatggctgatcccagccaagatgaaacaatagccctttgtctcctcagaacaacctatctccaactctttgtccactgttcttaccccaattaaaacaagaaagcatgtgctaatccttttttaatttttatcaacctgccttggcctcctttcactgtactccattattccttctgtgatgttctaccttcttcaccttttgagaccagggtgagttgggagcagtttgcctaccttcttttagaatctggggcttatcttttagtacaagccattgaataagcctcttccttttttttgctcaaacattccacatccttgtggattcccctgcattgtttgttttatataacatttgatatttgttgtagcttgtatatgaacataattttctttagaggtagtcactcttctctccagtatgacccaggtttcttgactctgagtaatgcaccttctataactatctaaatttctactgaagctttttggattatgagtatgctgacttttcacgattggctggtgcatgtttagacttaaatgtcatatccttcatgtctcaaagccaaaatagtaacatctcatctcagaacagagctgtgaccacatgccaatatatgtgtcacaaagtctacatatgttacattccttggaagtctccttaaatgtttcacaaaatgtcaacaagcttgttttgttattgatatttccgagattgggcacatttaagacagtaaacgggaaaggtggtgaagatgctataagaagatgctgtatcttgagaattgaaaaatgagaatctgacatggtttgaaaaatcatgaagggtatatataaaggatgcatgtgtaggagccattaaaattcataacagtatgtgccccttcagcgttttaatcttatgaagtggttaagagataagtcttcggagttggacaaaaggatttgaatttaggttctgtggattattatgggtccttgataaattctcaaagcctttttttttgttcatctctaaaataggaatataggattacctaccacattgactcgtaaggactatatgagaccatgtatatagaatgtttaacatagtaccaggctttacaaagaactcaataaatgtttaccattattgaaatagttttgtagactgaggatctcattattttacagccttgaattatgtcctgtatactctgttaaagaaactgggaaaaaaatgccaactggttgtttctgggtggcggaattatggctgtttcttttcttttttaatttctatagtaagtttgaataactttcataacatttaggaaaaaatattaaaggaaagaaaaaagatcagggaatttaaatatatttttagtagatatttttatccaaacttaattcttagaatgataaacacatagtttaccagaaaactcagctgttcaaaactactcagtccccaaaggactcaggtaaacaggctgagggttttatatatagagtgctctagagtttcctttttctgtcatttttttctccatgttagtgaaaaaaacatgggaatcttaagacattaagccgtttctccttttctaggtaatattacttctaaatggagaattgtttgtgttgtttttcatctcaaatggaaacagtatttctttgaagtttttcacatcccttatgatcaggaagttctgtcagctgctatattaaagtcctcctgctataacttactcagtcttctctgtacttacatgaatttgattaagtatcttcttttccagagtttccataatcatagattactctcacatctttcttccaccaacagtagaaaatattttggtggaaatgttatgatactacattgcctctaacttaaatatgttcacttttaaaaccatcatgactgttatattcaa

SEQ ID NO: 531 - DNA, 4276 bp, Human
ccacgcgtccgccgcgccgcccgcagccccctcccggccctgcagcccctgggcgggcggcgcccctcggaggacggctccgggcccggggggacggagggcctggtcgcctggaggaagccggaggcctgcgtggaggaggcgccccgcgcagctggctggcggagcatgagcgccccagatcccaagcactgcaagtccagatgcaacgggagcctggctcaagggacgacaagatccagccggaaagtgtagaagtcacaccccaatggcgggatagcagcccctgtgtgtgagcacccctccatgccaggaggagggccagagatggatgactacatggagacgctgaaggatgaagaggacgccttgtgggagaatgtggagtgtaaccggcacatgctcagccgctatatcaaccctgccaagctcacgccctacctgcgtcagtgtaaggtcattgatgagcaggatgaagatgaagtgcttaatgcccctatgctgccatccaagatcaaccgagcaggccggctgttggacattctacataccaaggggcaaaggggctatgtggtcttcttggagagcctagaattttattacccagaactgtacaaactggtgactgggaaagagcccactcggagattctccaccattgtggtggaggaaggccacgagggcctcacgcacttcctgatgaacgaggtcatcaagctgcagcagcagatgaaggccaaggacctgcaacgctgcgagctgctggccaggttgcggcagctggaggatgagaagaagcagatgacgctgacgcgcgtggagctgctaaccttccaggagcggtactacaagatgaaggaagagcgggacagctacaatgacgagctggtcaaggtgaaggacgacaactacaacttagccatgcgctacgcacagctcagtgaggagaagaacatggcggtcatgaggagccgagacctccaactcgagatcgatcagctaaagcaccggttgaataagatggaggaggaatgtaagctggagagaaatcagtctctaaaactgaagaatgacattgaaaatcggcccaagaaggagcaggttctggaactggagcgggagaatgaaatgctgaagaccaaaaaccaggagctgcagtccatcatccaggccgggaagcgcagcctgccagactcagacaaggccatcctggacatcttggaacacgaccgcaaggaggccctggaggacaggcaggagctggtcaacaggatctacaacctgcaggaggaggcccgccaggcagaggagctgcgagacaagtacctggaggagaaggaggacctggagctcaagtgctcgaccctgggaaaggactgtgaaatgtacaagcaccgcatgaacacggtcatgctgcagctggaggaggtggagcgggagcgggaccaggccttccactcccgagatgaagctcagacacagtactcgcagtgcttaatcgaaaaggacaagtacaggaagcagatccgcgagctggaggagaagaacgacgagatgaggatcgagatggtgcggcgggaggcctgcatcgtcaacctggagagcaagctgcggcgcctctccaaggacagcaacaacctggaccagagtctgcccaggaacctgccagtaaccatcatctctcaggactttggggatgccagccccaggaccaatggtcaagaagctgacgattcttccacctcggaggagtcacctgaagacagcaagtacttcctgccctaccatccgccccagcgcaggatgaacctgaagggcatccagctgcagagagccaaatcccccatcagcctgaagcgaacatcagattttcaagccaaggggcacgaggaagaaggcacggacgccagccctagctcctgcggatctctgcccatcaccaactccttcaccaagatgcagcccccccggagccgcagcagcatcatgtcaatcaccgccgagcccccgggaaacgactccatcgtcagacgctacaaggaggacgcgccccatcgcagcacagtcgaagaagacaatgacagcggcgggtttgacgccttagatctggatgatgacagtcacgaacgctactccttcggaccctcctccatccactcctcctcctcctcccaccaatccgagggcctggatgcctacgacctggagcaggtcaacctcatgttcaggaagttctctctggaaagacccttccggccttcggtcacctctgtggggcacgtgcggggcccagggccctcggtgcagcacacgacgctgaatggcgacagcctcacctcccagctcaccctgctggggggcaacgcgcgagggagcttcgtgcactcggtcaagcctggctctctggccgagaaagccggcctccgtgagggccaccagctgctgctgctagaaggctgcatccgaggcgagaggcagagtgtcccgttggacacatgcaccaaagaggaagcccactggaccatccagaggtgcagcggccccgtcacgctgcactacaaggtcaaccacgaagggtaccggaagctggtgaaggacatggaggacggcctgatcacatcgggggactcgttctacatccggctgaacctgaacatctccagccagctggacgcctgcaccatgtccctgaagtgtgacgatgttgtgcacgtccgtgacaccatgtaccaggacaggcacgagtggctgtgcgcgcgggtcgaccctttcacagaccatgacctggatatgggcaccatacccagctacagccgagcccagcagctcctcctggtgaaactgcagcgcctgatgcaccgaggcagccgggaggaggtagacggcacccaccacaccctgcgggcactccggaacaccctgcagccggaagaagcgctttcaacaagcgacccccgggtcagcccccgtctctcgcgagcaagcttcctttttggccagctccttcagttcgtcagcaggtccgagaacaagtataagcggatgaacagcaacgagcgggtccgcatcatctcggggagtccgctagggagcctggcccggtcctcgctggacgccaccaagctcttgactgagaagcaggaagagctggaccctgagagcgagctgggcaagaacctcagcctcatcccctacagcctggtacgcgccttctactgcgagcgccgccggcccgtgctcttcacacccaccgtgctggccaagacgctggtgcagaggctgctcaactcgggaggtgccatggagttcaccatctgcaagtcagatatcgtcacaagagatgagttcctcagaaggcagaagacggagaccatcatctactcccgagagaagaaccccaacgcgttcgaatgcatcgcccctgccaacattgaagctgtggccgccaagaacaagcactgcctgctggaggctgggatcggctgcacaagagacttgatcaagtccaacatctaccccatcgtgctcttcatccgggtgtgtgagaagaacatcaagaggttcagaaagctgctgccccggcctgagacggaggaggagttcctgcgcgtgtgccggctgaaggagaaggagctggaggccctgccgtgcctgtacgccacggtggaacctgacatgtggggcagcgtagaggagctgctccgcgttgtcaaggacaagatcggcgaggagcagcgcaagaccatctgggtggacgaggaccagctgtgaggcgggcgccctgggcagagagactctgtggcgcggggcatcctatgaggcaggcaccctgggcagagagatgcagtgggtgcggggggatcctgtggcccacagagctgccccagcagacgctccgccccacccggtgatggagccccggggggacagtcgtgcctggggaggagcagggtacagcccattcccccagccctggctgacctggcctagcagtttggccctgctggccttagcagggagacaggggagcaaagaacgccaagccggaggcccgaggccagccggcctctcgagagccagagcagcagttgaatgtaatgctggggacaggcatgctgccgccagtagggcggggacccggacagccaggtgactaccagtcctggggacacactcaccataaacacatccccaggcaggacagatcggggaaggggtgtgtaccaggctatgatttctcttgcattaaaatgtattattaaaaaaaaaaaaaaaa

SEQ ID NO: 532 - DNA, 2420 bp, Human
ggaaccaatataatggcagtgtctggtggtctgcccggccactggatgctttacaaacatgacccagtagcagtcccagctcgagttctcatggccttttgagagacgacattgatgcttgtggaggtcacagttaggaaagagcgggctgggatttgaacccagggctgaccaatcccaagcatagccaaggcctccttacctggctccctgagaaactggggagcagaggcccgctcctggctgggagcgtttgccgagcagcttgtgctgagccaagtggcacggacaatctgccacccaagggtcttcaccctcccgctcccctcccgcagaagtgctggcggaaggtgtgggctctgctgtatgcaggaggcccatcaggcgtggcacggctggagagctgggaggtccgggatggtggcctgggagcagcgggtgacaggtcggcagggcctggccggcgaggggagcgacgggtcatccgcctggctgactgtgtgtccgtgctgccggctgacggcgagagctgcccccgggacaccggtgccttcctgctcaccaccaccgagcgaagccatctactggctgctcagcaccgccaggcctggatgggccccatctgccagctggccttcccggggacaggggaggcctcctcaggatccacagatgcccagtctcccaagaggggcctggtccccatggaggaaaactccatctactcctcctggcaggaagtgggcgagtttcccgtggtggtgcagaggactgaggccgccacccgctgccagctgaaggggccggccctgctggtgctgggcccagacgccatccagctgagggaggccaagggcacccaggccctctacagctggccctaccacttcctgcgcaagttcggctccgacaagatacttctgggaaccccaggcgtcagtctcctcatctgtaaaggagagagaaccgatgacgtatcaggcataatccttgatgagagtttgctgcgtgcctactcagtgccaggcgctgggggacacagccgtgttcaggacagccttggtcctgttctccgggagccgacattccagggggagagaagtttcctgaagacttccatgctgcgttccctcctctgctcctgctcctggcgccatcctaggagccagccatgcacgcaagcgtcatgcctccagggctctgactgcccagcccctcaccgcaactccacctcagctgcacacacccttggcacatcctgaacctcattttcatgacggacacacaatttttgctctctcctgtccaagcctcatcctctggccgccacctctttccagctcacttcctttagtgcggccagtaccgcccctgcctaggcatgtcgacctgcagggacccttttctggctcttcgaggcctctgcccaccatcccctctttgttctccatagtcccttccccctgttctctctcgtttcatcttactggtctggcaaagtccccggccttgggcgagcccagacctcctcagtgcctgcacacagctgcccacagccagagaaatccatttaagcagactgcctgcatccttcttaacagtgcaaggcaggcactccctgccacaagagaccctgttccctagtagggcagcttttctcctccccagaacctcctgtctatccccacccaatgtctcctcacaggcatattggggaaacaggtcaggctctcccaccgtatctgcaagtgtactggcatccatctgtcttcttcctacccctacagtagaaacagtgtctgtccccagctgtgctctgatcccggctcctttcacctcagagcttggaaaattgagctgtccccactctctcctgcgcccattcatcctaccagcagcttttccagccacacgcaaacatgctctgtaatttcacattttaaaccttcccttgacctcacattcctcttcggccacctctgtttctctgttcctcttcacagcaaaaactgttcaaaagagttgttgattactttcatttccactttctcacccccattctcccctcaattaactctccttcatccccatgatgccattatgtggcttttattagagtcaccaaccttattctccaaaacaaaagcaacaaggactttgacttctcagcagcactcagctctggttcttgaaacacccccgttacttgctattcctcctacctcataacaatctccttcccagcctctactgctgccttctctgagttcttcccagggtcctaggctcagatgtagtgtagctcaaccctgctacacaaagaatctcctgaaagcctgtaaaaatgtccatgcatgttctgtgagtgatctaccaagaaaataaaaaattttaaaaatcaaaaaaaaaaaaaaaaaaaa

SEQ ID NO: 533 - DNA, 1001 bp, Human
cctttaagagcagcgattgtaaggagaggcggtcccggtgtcctcgggtcccaggtgattgtgaagtgctgaccaattgccactggacatacttgaaacaaaataggaaaatggcagcaaactcttcaggacaaggttttcaaaacaaaaatagagttgcaatcttggcagaactggacaaagagaaaagaaaactacttatgcagaaccagtcttcaacaaatcatcctggagctagcattgcactctcgagaccctctcttaataaggacttccgggatcacgctgagcagcagcatattgcagcccaacagaaggcagctttgcagcatgctcatgcacattcatctggatacttcatcactcaagactctgcatttgggaaccttattcttcctgttttacctcgccttgacccagaatgaagaaaacattgcgatggaaaagtgactttgtaatatcaaataccaagctactatcattcagtgctacatgaactgtgacttaagaatttggtgaactttgatattttttggttgtctgaaagaaaggaatgtgtaagtgaagctgaaagagaataaccaggatgatgagagctgtggaagctgtatcgtccaaggaattgattatgtaccgtgactgtaacttttttgtaatgctgtttaactctcaatcagactgtgaactggatggtcacgaagtcattccccaactcctagcaagtttgactgaatatatcatgtccacagtagattttcaagaatcatttatagtacttaactttaaagaaacaaggctgcttttaaaaaatgaactaataggcttaaatcaattgcatccatatttgctgtttataggattgctatcagtataccttttgcgtttatagtcaacatgtatcatcctgaaatattctttctggacttataactacttccccctttttcactttaaaacaaacctcaagaataaattactaaccagtcttaaccatcttttac

SEQ ID NO: 534 - protein, 104 aa, Human
MAANSSGQGFQNKNRVAILAELDKEKRKLLMQNQSSTNHPGASIALSRPSLNKDFRDHAEQQHIAAQQKAALQHAHAHSSGYFITQDSAFGNLILPVLPRLDPE

SEQ ID NO: 535 - DNA, 1684 bp, Human
gtgctgagatctctccttctcgaaccctgctatgcctttgcatacgctgttttctccacctgccacgttctcaccccttcttcttccactgcaaactcctatgcagccgtcaaggccccattctcctctggaaagccttcccgatccccttggcaacaaccaccaccaatatttattcactgagcccactttgtgccaagcattgttctagacacggagaggaggaagctcctgccggctgagcgggcctggaggaagtgagcagcggggctcctgcctcccggcctggtccccgaagaccccagaagaacccggaacttgcttccattcggaatccagggaccaccctttgcactcagtaggcctttgttttcctgcgtggaaagcggttgggcttgggaggcgatggagccggagttcttgtacgacctgctgcagctccccaagggggtggagcccccagcggaggaggagctctcaaaaggaggaaagaagaaatacctgccacccacttcccggaaggaccccaaatttgaagaactgcagaaggtgttgatggagtggatcaatgccactcttctccccgagcacattgtggtccgcagcctggaggaggacatgttcgacgggctcatcctacaccacctattccagaggctggcggcgctcaagctggaagcagaggacatcgccctgacagccacaagccagaagcacaagctcacagtggtgctggaggccgtgaaccggagtctgcagctggaggagtggcaggccaagtggagcgtggagagcatcttcaacaaggacctgttgtctaccctgcacctccttgtggccctggccaagcgcttccagcccgacctctccctcccaaccaacgtccaggtggaggtcatcactatcgagagcaccaaaagtggtctgaagtcagagaagttggtggaacagctcactgaatacagcacagacaaggacgagcctccaaaggacgtctttgatgaattatttaagctggctccggagaaagtgaacgcagtgaaagaggccatcgtgaactttgtcaaccagaagctggaccgcctgggcctgtctgtgcagaatctggacacccagtttgcagatggggtcatcttactcttgctgattggacaacttgaaggcttcttcctgcacttaaaggaattctacctcactcccaactctcctgcagaaatgctgcacaacgtcaccctggcgctggagctgctgaaggacgagggcctgctcagctgccctgtcagccctgaagatatcgtgaacaaggatgccaagagcacactgcgggtgctctatggtctgttctgcaagcacacgcagaaggcacacagggacaggacgccccatggagccccgaattgaccctcactgcctccaaagcccagagcctgcctgtcagcccagctggagggcccgaggctgcagggtgtcctcccacagtcccgctgtttcctgtgcattcgtgacccgcttccctcccaccctgtctcctgtctccatcgttggattatctttgaacccccttgtgtggatcattttgagccgcctggccttgctcagtttattttaataaaagtatttctgggaaaaaaaaaaaaaaaaaaaaaaaaaaaaaaaaaaaaaaaaaaaaaaaaaaaaaaaaaaa

SEQ ID NO: 536 - DNA, 3652 bp, Human
gggaggggtgcgaggctagccacgcaggcggggccctgggtcattttaaactctcagagtgaacgtcttgataggaccgacaagacgcatgacatgtacttagaaagcttatcttagagccacactgagattggaacccgcaaaatatgccagggaggaaggtgagcaagggacacgacactcacccggagaaacccagcaagcgcagcgaggctgtggggagaccggagccctgcacaccgccgggggaaggtgggccagcgccaccaccgtggagaacagcgcggaggcaccccacgagatgagacggaactgccgtgagatccagcaatgccaactgtgggtctgacccaggagaacggaaagcagggacgtgaacagccctcctcatgttcttgacaccgtcattctcagcagctcagctaaggcacagaggcagccgagcgtctgtcagcggagtcgtggctgagcagaacacgccacacgccacacgccacacgccacacgtgcaggattgctcaagatggaagggcacagtggaatatatatatatatttatatttttggcgagaccctggaggacacactgaatacaatggaataccatcccgcctttgaaaggaagggaaatcctggcacacgctgcaacaggagggagcttgaggacactgtggtgagtggagcacgtgagacacggaaggacacacgctgaagacacgcagagatgcccacccacgtggggaggtgacaggggagcccagcgcacagagacaaagtggaatggaggcctgggggctgggagcaaatgcggagcgagtgcttcctggggcagagtctccgtttgggaagatgagaaggttctgccgacggatgctggcgatggttgcagaagaatgtgaatgtgcccaatgctactgaaaaacggttacaatggaaacgccaccccagtgaccaccactgccccgtgggcctccctgggcctctccgccaagacctgcaacaacgtgtccttcgaagagagcaggatagtcctggtcgtggtgtacagcgcggtgtgcacgctgggggtgccggccaactgcctgactgcgtggctggcgctgctgcaggtactgcagggcaacgtgctggccgtctacctgctctgcctggcactctgcgagctgctgtacacaggcacgctgccactctgggtcatctatatccgcaaccagcaccgctggaccctaggcctgctggcctgcaaggtgaccgcctacatcttcttctgcaacatctacgtcagcatcctcttcctgtgctgcatctcctgcgaccgcttcgtggccgtggtgtacgcgctggagagtcggggccgccgccgccggaggaccgccatcctcatctccgcctgcatcttcatcctcgtcgggatcgttcactacccggtgttccagacggaagacaaggagacctgctttgacatgctgcagatggacagcaggattgccgggtactactacgccaggttcaccgttggctttgccatccctctctccatcatcgccttcaccaaccaccggattttcaggagcatcaagcagagcatgggcttaagcgctgcccagaaggccaaggtgaagcactcggccatcgcggtggttgtcatcttcctagtctgcttcgccccgtaccacctggttctcctcgtcaaagccgctgccttttcctactacagaggagacaggaacgccatgtgcggcttggaggaaaggctgtacacagcctctgtggtgtttctgtgcctgtccacggtgaacggcgtggctgaccccattatctacgtgctggccacggaccattcccgccaagaagtgtccagaatccataaggggtggaaagagtggtccatgaagacagacgtcaccaggctcacccacagcagggacaccgaggagctgcagtcgcccgtggcccttgcagaccactacaccttctccaggcccgtgcacccaccagggtcaccatgccctgcaaagaggctgattgaggagtcctgctgagcccactgtgtggcagggggatggcaggttgggggtcctggggccagcaatgtggttcctgtgcactgagcccaccagccacagtgcccatgtcccctctggaagacaaactaccaatttctcgttcctgaagccactccctccgtgaccactggccccaggctttcccacatggaaggtggctgcatgccaaggggaggagcgacacctccaggcttccgggagcccagagagcatgtggcaggcagtggggcctcttcatcagcagcctgcctggctggctcccttggctgtgggcaggtagcacgcctgctggcagaggtacctggtggctgccctgttcgcatcagtggcgatgactttatttgcggagcatttctgcaagcgttgcctggatgcggtggtgcattgtgggccctctgggctcctgcctcagaatgtcagtgagcaccatgctggaggtcacccagcactgtggcagcgcccaggagggcatagggcagcctaccacctccaagggggcaggcgccctcatctggggttgggtctgtgctgagctggagggcctctagggaaccgtggggcagggtggccagctgctggctcccagagcgcagcccaggcgtcctcaacggggagccccaaatgtccacgcccagaacaacagttggcaggacaggtgtgacacagccacagcagaggcaaggggtgccaggagtccccagcggcatcctcggggagatgctggtgaggggtccgtacagggtggggtccccacccctagccccttactgaggggggagtgcagcagttggcctgcttgtctggcggagaaagccagctccctgcaccctcggggctgagtcagatctgggtctgccgcaaaggccttgcctagaccaggtcacactgatgccctggtttccctatctgtaaaatggggccaatgacacctacctcactgggtcaccatcgagatcaatcctcctccctgccccgacacctcgggcacatcgcatgcactcagagcacagagccgggcagacgcagcacctgcatggggagcccagtgcccggcacagcacaggggcttccagggaggccgcgcagggccgtggggctgagccacgctctcgttttgtcaggcagctatgcagttgctcttccttgtttttgttttgtttttgtttttgtttttaatatttatttttttagagacagggccttgctctgttgcctgggctggagaacagtggcaccatcatagctcactgcagcctcaaactcctgggctcaagcgatcctccccgctcagcctcctgagtagctgggactacaggtgtgcaccaccacacccagccaaaacagccatcctccccttgagagtcatcagaaaaatacattaggaaaatgtgtttagaaataaaagcacaaggcagggcagtgctcacgcctgtcatcccagcactttgggaggccgagacgggaggatcagttgaggtcaggagtttgagaccagcctcggcaacatggcaaaatcttgtctcttttttttggtattaaaaaaatcataaaaataaaagaaataatgcaaaaaaaaaaaaaaaaaa

SEQ ID NO: 537 - DNA, 3827 bp, Human
ccacgcgtccggcaaaaggtctttcctcccttgctctctcctccaaccactggctcagcctctccgcccgctgcctgtgaatgatgcaatggaaggtgtgctggggtcgccctgtgtcccgtgcataggagcatctcagcctccaggtcctctcctttggggctcacggcacccccatgctacgaaccgcaggcagggacggcctctgtcgcctgtccacctacttggaagaactcgaggctgtggaactgaagaagttcaagttatacctggggaccgcgacagagctgggagaaggcaagatcccctggggaagcatggagaaggccggtcccctggaaatggcccagctgctcatcacccacttcgggccagaggaggcctggaggttggctctcagcacctttgagcggataaacaggaaggacctgtgggagagaggacagagagaggacctggtgagggataccccacctggtggcccgtcctcacttgggaaccagtcaacatgccttctggaagtctctcttgtcactccaagaaaagatccccaggaaacctacagggactatgtccgcaggaaattccggctcatggaagaccgcaatgcgcgcctaggggaatgtgtcaacctcagccaccggtacacccggctcctgctggtgaaggagcactcaaaccccatgcaggtccagcagcagcttctggacacaggccggggacacgcgaggaccgtgggacaccaggctagccccatcaagatagagaccctctttgagccagacgaggagcgccccgagccaccgcgcaccgtggtcatgcaaggcgcggcagggataggcaagtccatgctggcacacaaggtgatgctggactgggcggacgggaagctcttccaaggcagatttgattatctcttctacatcaactgcagggagatgaaccagagtgccacggaatgcagcatgcaagacctcatcttcagctgctggcctgagcccagcgcgcctctccaggagctcatccgagttcccgagcgcctccttttcatcatcgacggcttcgatgagctcaagccttctttccacgatcctcagggaccctggtgcctctgctgggaggagaaacggcccacggagctgcttcttaacagcttaattcggaagaagctgctccctgagctatctttgctcatcaccacacggcccacggctttggagaagctccaccgtctgctggagcaccccaggcatgtggagatcctgggcttctctgaggcagaaaggaaggaatacttctacaagtatttccacaatgcagagcaggcgggccaagtcttcaattacgtgagggacaacgagcctctcttcaccatgtgcttcgtccccctggtgtgctgggtggtgtgtacctgcctccagcagcagctggagggtggggggctgttgagacagacgtccaggaccaccactgcagtgtacatgctctacctgctgagtctgatgcaacccaagccgggggccccgcgcctccagcccccacccaaccagagagggttgtgctccttggcggcagatgggctctggaatcagaaaatcctatttgaggagcaggacctccggaagcacggcctagacggggaagacgtctctgccttcctcaacatgaacatcttccagaaggacatcaactgtgagaggtactacagcttcatccacttgagtttccaggaattctttgcagctatgtactatatcctggacgagggggagggcggggcaggcccagaccaggacgtgaccaggctgttgaccgagtacgcgttttctgaaaggagcttcctggcactcaccagccgcttcctgtttggactcctgaacgaggagaccaggagccacctggagaagagtctctgctggaaggtctcgccgcacatcaagatggacctgttgcagtggatccaaagcaaagctcagagcgacggctccaccctgcagcagggctccttggagttcttcagctgcttgtacgagatccaggaggaggagtttatccagcaggccctgagccacttccaggtgatcgtggtcagcaacattgcctccaagatggagcacatggtctcctcgttctgtctgaagcgctgcaggagcgcccaggtgctgcacttgtatggcgccacctacagcgcggacggggaagaccgcgcgaggtgctccgcaggagcgcacacgctgttggtgcagctaccagagaggaccgttctgctggacgcctacagtgaacatctggcagcggccctgtgcaccaatccaaacctgatagagctgtctctgtaccgaaatgccctgggcagccggggggtgaagctgctctgtcaaggactcagacaccccaactgcaaacttcagaacctgaggctgaagaggtgccgcatctccagctcagcctgcgaggacctctctgcagctctcatagccaataagaatttgacaaggatggatctcagtggcaacggcgttggattcccaggcatgatgctgctttgcgagggcctgcggcatccccaatgcaggctgcagatgattcagttgaggaagtgtcagctggagtccggggcttgtcaggagatggcttctgtgcttggcaccaacccacatctggttgagttggacctgacaggaaatgcactggaggatttgggcctgaggttactatgccagggactgaggcacccagtctgcagactacggactttgtggctgaagatctgccgcctcactgctgctgcctgtgacgagctggcctcaactctcagtgtgaaccagagcctgagagagctggacctgagcctgaatgagctgggggacctcggggtgctgctgctgtgtgagggcctcaggcatcccacgtgcaagctccagaccctgcggttgggcatctgccggctgggctctgccgcctgtgagggtctttctgtggtgctccaggccaaccacaacctccgggagctggacttgagtttcaacgacctgggagactggggcctgtggttgctggctgaggggctgcaacatcccgcctgcagactccagaaactgtggctggatagctgtggcctcacagccaaggcttgtgagaatctttacttcaccctggggatcaaccagaccttgaccgacctttacctgaccaacaacgccctaggggacacaggtgtccgactgctttgcaagcggctgagccatcctggctgcaaactccgagtcctctggttatttgggatggacctgaataaaatgacccacagtaggttggcagcgcttcgagtaacaaaaccttatttggacattggctgctgaatggtcctatctgctggctctcccctgagatctggacagaggaagatgggagggtgctcatcacccccccagcataatgatcagcctccttcctagagacagactcatgcagattgagatcaaaagtccctctgcttgggatcaaattaatgtttgacagagctggccaggcgtggtggctcatgtatgtaatcctagcacttcgagaggccgaggcaggtggatcacgaggtcaggagtttgagattagcctggccaagatggtgaaaccctgtctctactaaaaataaaaaaaaattagccaggcatggtggcgggcacctgtagtcccagctactcaggaggctgaggcaggagaatcgcttgaacccgggaggtggaggttgcagtgagccgagatcgcgccactgcactccagcctgggcgacagagtgggactccatctcaaaaaaaaaaaaaaaaaaa

SEQ ID NO: 538 - protein, 1061 aa, Human
MLRTAGRDGLCRLSTYLEELEAVELKKFKLYLGTATELGEGKIPWGSMEKAGPLEMAQLLITHFGPEEAWRLALSTFERINRKDLWERGQREDLVRDTPPGGPSSLGNQSTCLLEVSLVTPRKDPQETYRDYVRRKFRLMEDRNARLGECVNLSHRYTRLLLVKEHSNPMQVQQQLLDTGRGHARTVGHQASPIKIETLFEPDEERPEPPRTVVMQGAAGIGKSMLAHKVMLDWADGKLFQGRFDYLFYINCREMNQSATECSMQDLIFSCWPEPSAPLQELIRVPERLLFIIDGFDELKPSFHDPQGPWCLCWEEKRPTELLLNSLIRKKLLPELSLLITTRPTALEKLHRLLEHPRHVEILGFSEAERKEYFYKYFHNAEQAGQVFNYVRDNEPLFTMCFVPLVCWVVCTCLQQQLEGGGLLRQTSRTTTAVYMLYLLSLMQPKPGAPRLQPPPNQRGLCSLAADGLWNQKILFEEQDLRKHGLDGEDVSAFLNMNIFQKDINCERYYSFIHLSFQEFFAAMYYILDEGEGGAGPDQDVTRLLTEYAFSERSFLALTSRFLFGLLNEETRSHLEKSLCWKVSPHIKMDLLQWIQSKAQSDGSTLQQGSLEFFSCLYEIQEEEFIQQALSHFQVIVVSNIASKMEHMVSSFCLKRCRSAQVLHLYGATYSADGEDRARCSAGAHTLLVQLPERTVLLDAYSEHLAAALCTNPNLIELSLYRNALGSRGVKLLCQGLRHPNCKLQNLRLKRCRISSSACEDLSAALIANKNLTRMDLSGNGVGFPGMMLLCEGLRHPQCRLQMIQLRKCQLESGACQEMASVLGTNPHLVELDLTGNALEDLGLRLLCQGLRHPVCRLRTLWLKICRLTAAACDELASTLSVNQSLRELDLSLNELGDLGVLLLCEGLRHPTCKLQTLRLGICRLGSAACEGLSVVLQANHNLRELDLSFNDLGDWGLWLLAEGLQHPACRLQKLWLDSCGLTAKACENLYFTLGINQTLTDLYLTNNALGDTGVRLLCKRLSHPGCKLRVLWLFGMDLNKMTHSRLAALRVTKPYLDIGC

SEQ ID NO: 539 - DNA, 2396 bp, Human
ggaagttgagcggcggcaagaaataatggcggcagctacgggggatcctggactctctaaactgcagtttgccccttttagtagtgccttggatgttgggttttggcatgagttgacccagaagaagctgaacgagtatcggctggatgaagctcccaaggacattaagggttattactacaatggtgactctgctgggctgccagctcgcttaacattggagttcagtgcttttgacatgagtgctcccaccccagcccgttgctgcccagctattggaacactgtataacaccaacacactcgagtctttcaagactgcagataagaagctccttttggaacaagcagcaaatgagatatgggaatccataaaatcaggcactgctcttgaaaaccctgtactcctcaacaagttcctcctcttgacatttgcagatctaaagaagtaccacttctactattggttttgctatcctgccctctgtcttccagagagtttacctctcattcaggggccagtgggtttggatcaaaggttttcactaaaacagattgaagcactagagtgtgcatatgataatctttgtcaaacagaaggagtcacagctcttccttacttcttaatcaagtatgatgagaacatggtgctggtttccttgcttaaacactacagtgatttcttccaaggtcaaaggacgaagataacaattggtgtatatgatccctgtaacttagcccagtaccctggatggcctttgaggaattttttggtcctagcagcccacagatggagtagcagtttccagtctgttgaagttgtttgcttccgtgaccgtaccatgcagggggcgagagacgttgcccacagcatcatcttcgaagtgaagcttccagaaatggcatttagcccagattgtcctaaagcagttggatgggaaaagaaccagaaaggaggcatgggaccaaggatggtgaacctcagtgaatgtatggaccctaaaaggttagctgagtcatcagtggatctaaatctcaaactgatgtgttggagattggttcctactttagacttggacaaggttgtgtctgtcaaatgtctgctgcttggagccggcaccttgggttgcaatgtagctaggacgttgatgggttggggcgtgagacacatcacatttgtggacaatgccaagatctcctactccaatcctgtgaggcagcctctctatgagtttgaagattgcctagggggtggtaagcccaaggctctggcagcagcggaccggctccagaaaatattccccggtgtgaatgccagaggattcaacatgagcatacctatgcctgggcatccagtgaacttctccagtgtcactctggagcaagcccgcagagatgtggagcaactggagcagctcatcgaaagccatgatgtcgtcttcctattgatggacaccagggagagccggtggcttcctgccgtcattgctgcaagcaagagaaagctggtcatcaatgctgctttgggatttgacacatttgttgtcatgagacatggtctgaagaaaccaaagcagcaaggagctggggacttgtgtccaaaccaccctgtggcatctgctgacctcctgggctcatcgctttttgccaacatccctggttacaagcttggctgctacttctgcaatgatgtggtggccccaggagattcaaccagagaccggaccttggaccagcagtgcactgtgagtcgtccaggactggccgtgattgcaggagccctggccgtggaattgatggtatctgttttgcagcatccagaagggggctatgccattgccagcagcagtgacgatcggatgaatgagcctccaacctctcttgggcttgtgcctcaccagatccggggatttctttcacggtttgataatgtccttcccgtcagcctggcatttgacaaatgtacagcttgttcttccaaagttcttgatcaatatgaacgagaaggatttaacttcctagccaaggtgtttaattcttcacattccttcttagaagacttgactggtcttacattgctgcatcaagaaacccaagctgctgagatctgggacatgagcgatgatgagaccatctgagatggccccgctgtggggctgacttctccctggccgcctgctgaggagctctccatcgccagagcaggactgctgaccccaggcctggtgattctgggcccctcctccataccccgaggtctgggattcccccctctgctgcccaggagtggccagtgttcggcgttgctcgggattcaagataccaccagttcagagctaaataataaccttggccttggccttgctattgacctgggaaaaaaaaaaaaaaaaaaaa

SEQ ID NO: 540 - protein, 703 aa, Human
MAAATGDPGLSKLQFAPFSSALDVGFWHELTQKKLNEYRLDEAPKDIKGYYYNGDSAGLPARLTLEFSAFDMSAPTPARCCPAIGTLYNTNTLESFKTADKKLLLEQAANEIWESIKSGTALENPVLLNKFLLLTFADLKKYHFYYWFCYPALCLPESLPLIQGPVGLDQRFSLKQIEALECAYDNLCQTEGVTALPYFLIKYDENMVLVSLLKHYSDFFQGQRTKITIGVYDPCNLAQYPGWPLRNFLVLAAHRWSSSFQSVEVVCFRDRTMQGARDVAHSIIFEVKLPEMAFSPDCPKAVGWEKNQKGGMGPRMVNLSECMDPKRLAESSVDLNLKLMCWRLVPTLDLDKVVSVKCLLLGAGTLGCNVARTLMGWGVRHITFVDNAKISYSNPVRQPLYEFEDCLGGGKPKALAAADRLQKIFPGVNARGFNMSIPMPGHPVNFSSVTLEQARRDVEQLEQLIESHDVVFLLMDTRESRWLPAVIAASKRKLVINAALGFDTFVVMRHGLKKPKQQGAGDLCPNHPVASADLLGSSLFANIPGYKLGCYFCNDVVAPGDSTRDRTLDQQCTVSRPGLAVIAGALAVELMVSVLQHPEGGYAIASSSDDRMNEPPTSLGLVPHQIRGFLSRFDNVLPVSLAFDKCTACSSKVLDQYEREGFNFLAKVFNSSHSFLEDLTGLTLLHQETQAAEIWDMSDDETI

SEQ ID NO: 541 - DNA, 402 bp, Human
acaccaaaaccccatctgtatgtcaccatcatcgaggaccaaaggtagataaaaccacaaagatggggaaaaaacagagcagaaaagctgaaaattataaaaatcagagcgcttctccccctccaaaggaccgcagctcctcaccagcaacggaacaaagctggacacagaatgactttgatgagttgagagaagaaggcttcagagaatcagacttctccgagctaaaggaggaagttcgaacccatcgcaaagaagctaaaaaccttgagaaaagattagacaaatggctaactagagtaaccagtgtagagaagtccttaaatgacctgatggagctgaaaaccatggcatgagaactacgtgacgaatgcacaagctttagtagctgattcaatcaac

SEQ ID NO: 542 - DNA, 3761 bp, Human
gcgaagactaaggcggcgccgggccccacagcagcagccgcagcccaagcgagcgcagcagcgcggcggcagccgcgggagcccctgggcaggcgtccgcccgcgcagccgccgccgccgcgggagcccgtcgccgggagcaggagcgggcggaagacaacggaggggccgagcgtccgagccactccgcggggaccgaacgagcagcccgaagcggcggcggccgaggacggggacagcgacgacgcggaggcagagaagggaacgcccggcccagccccgtagcacaggcggagtgcagcggaggcccctgccgctgccgtcatgccgttcccgtttgggaagtctcacaaatctccagcagacattgtgaagaatctgaaggagagcatggctgttctggaaaagcaagacatttctgataaaaaagcagaaaaggctacagaagaagtttccaaaaatctggttgccatgaaagaaattctgtatggcacaaatgaaaaagagcctcagacagaagcagtagctcaacttgctcaagaactctataatagtgggctccttagcaccctggtagctgatttacagctcattgactttgagggcaaaaaagacgtggctcaaattttcaacaatattctcagaagacaaattggtacgagaactcctactgttgaatacatctgcacccaacagaatattttgttcatgttattgaaagggtatgaatctccagaaatagctctaaattgtggaataatgttaagagaatgcatcagacatgaaccacttgcaaaaatcattttgtggtcggaacagttttatgatttcttcagatatgtcgaaatgtcaacatttgacatagcttcagatgcatttgccacattcaaggatttacttacaagacataaattgctcagtgcagaatttttggaacagcattatgatagatttttcagtgaatatgagaagttacttcattcagaaaattatgtgacaaaaagacagtcactgaagcttctcggtgaactactactagatagacacaacttcacaattatgacaaaatacatcagtaaacctgagaacctcaaattaatgatgaacctgctgcgagacaaaagtcgcaacatccagtttgaggcctttcacgtttttaaggtgtttgtagccaatcctaacaagacgcagcccatcctagacatcctcctcaagaaccaggccaaactcatagagttcctcagcaagtttcagaacgacaggacggaggatgagcagtttaacgacgagaagacctatttagttaaacagatcagggatttgaagagaccagctcagcaagaagcttaatctccaataaacatctatgttaaatccaaattcagcatttgctgttagctattcagcatcaggcactcttattgattcatgaggaacattactgctaatctgctgttaagtgaacggtttttcattttacccttttgtttttcagtccaggttggagatcgtagctgctgctgcttgcacactagggcacatgtgggctttctcttgatctttgtgtcatttcagaattcaaagactgtgctacgggagttctgaacatggctgggttcatgaaggcaaatgtatggatgagagtgtggtttaggaaagagggcactgatatcagattagacctatgtgtttgcacccatctttgttggcgatctgagtgcagtgtggcaagtgcacacctggcatccctgcgtcagatcgcgcaccttcaggtcgcgcaccttcgctgaaggaagatgacgcagagctttatctgaaatcagaggggaactatccaaaatgggagtttgggggcagctaaagttgacatgcgaataaattgatactgaaacttagcaacttcttaaaagtgtaaagaagcctcataagatcataaggaaaatgtatatatgcttttcacagctttctagaattttttgacatttgattttcttgagacttgtaaacctggatatgttgaagggtatttgttaattttacttttcaaagatactttaaaacagtagagctagcaatgacaccttgcatttcatttcaacactgcttcaaggtttcttttgtatataattcttagaatgctcatttcttttaaatggtttaatttgtacagcagaggaatgttattgtagtagtatgtaactattacctaatactgagtttttgcaaaaaacaatgaatgctcatatgtaattgaaatacttcagatcacatgaaaatgctgatttaacatttaagtatcacagcattaaaagaaaaagaaagtaaaccagtcctttgtattcagttacctaatggggtgccatcaataagctgcgatacagccctggagctcagtcagccacaccttcctgcatcctattggccttattcattttaaatgagttaatgaatctgccagatctgtgaatgatagagattatgctaaattaatgctgattctttgtgtgtgtgggaaatctctgtagagcaccttttctttcttagactaagtaacccagtacaatagttgtgaactgaataattaaaactttggcttctcttaggaaaagacgacttcctagtcataggtgtcctatggggaaatttattttttttaatgtcctgttccttaatgctgcaaattatcagtatttataaagtaactgattttgcaccacttttttgttactgtgaccacggcagaacaatgtcttctagactatatctatgtaaagttattagaatggtatctgttcattttagtgatatgaagatcacaactaacaactgacaaatcagagtttgccagttcaaattcagcatggctgcagctgattaagaaattgatatgattattctttgctagcctctcttactaatggaattatatactggccagtaaaatgggcctcccaattgctgtttcagcaggttttaaaccttcaggaacaccagttaggaaaatagctccagaaaatatagatatattttatttttattaaaatggcagtctacatcataattggcatttctcaagactgtctttaccagaatctgtgtgaaataaggcaatctagtctccttgaaaaaaaaatctcttggatgtttaggaaggaagacttggccgtgatgtggtgtcctggctttgtggtgtagtgctgtgtgtatggagttagtgtaaaaacatggattacaccaagtggaagaaacgtcttcttgccaagctcattcttagaacttacacatctagaacagcttccactttggcagtgaggtcgtagccttttaggtggaagaagtgagggtgcagcgtgtcagacacaacattcatgttactcttacattggaatctgaaggtagttcagacttcgtgggttttgtttttaagcaaaacaatgtgaaaacatttaagtttgaaatgttgcatttgaagttatgatcatttaatatattcatattaccaagactattatactggaagtggtttttgtgttataaaggtttaattttacataaggcagttacttaatgtgatttttaacccttaaaaaagtggagatgtatacatttgttaacaatgccatgaaagcattttctttctcctaaggaaaagtgaatttcttatcagaatatctggctggccctgtaatttaaattaaaataaaattttggagaaacaaaaaaaaaaaaaaaaaaaaaaaaaaaaaaaaaaaaaaaaaaaa

SEQ ID NO: 543 - protein, 341 aa, Human
MPFPFGKSHKSPADIVKNLKESMAVLEKQDISDKKAEKATEEVSKNLVAMKEILYGTNEKEPQTEAVAQLAQELYNSGLLSTLVADLQLIDFEGKKDVAQIFNNILRRQIGTRTPTVEYICTQQNILFMLLKGYESPEIALNCGIMLRECIRHEPLAKIILWSEQFYDFFRYVEMSTFDIASDAFATFKDLLTRHKLLSAEFLEQHYDRFFSEYEKLLHSENYVTKRQSLKLLGELLLDRHNFTIMTKYISKPENLKLMMNLLRDKSRNIQFEAFHVFKVFVANPNKTQPILDILLKNQAKLIEFLSKFQNDRTEDEQFNDEKTYLVKQIRDLKRPAQQEA

SEQ ID NO: 544 - DNA, 4009 bp, Human
ccggagggggcggccgcggagcactggttggagcgccgcgccgcgcccgagcctcttgccttcgcgggcggcgccctggccgccggcagccttgtggccggtgccccgatccgccgcgctccggacccgggcaggcggggcgcgcccgctgcgcgcgggatgtggcagcccagacggccctggccccgcgtgccctggcgctgggcgctggcgctgctggccctggttggcgcggggctgtgccacgccggcccgcagcccgggtatcccgcgcggcccagcgccaggaacaagaactggtgcgcctacatcgtgaacaagaatgtgagctgctccgtgctggagggaagtgagagttttattcaggctcagtacaactgtgcctggaaccagatgccctgtccgtcggcgctggtgtatcgagtgaacttcagacctagatatgtcactaggtataagacagtgacacagttggaatggaggtgctgtcctggctttagagggggagattgccaagaaggtcccaaagaccccgtgaagaccctccgccccacgccggctcggcctcgaaatagcttgaagaaagccacagataatgaacccagccaattctcagagcccaggaagactttgtccccaactggtacagcacaaccaagctggggggtagatccaaaagaggggcctcaggaacttcaggaaaagaagatacaggtgctagaggagaaggttcttcgactcacaaggacggttcttgacctccagtcttcccttgctggagtgagtgaaaatctcaaacatgccactcaggatgatgccagtagaacacgggcaccagggctcagcagccagcaccccaagcctgacaccactgttagtggagacacagaaacgggccagagtcctggtgtcttcaacactaaggaatctggcatgaaggacatcaagtctgaattggctgaagtcaaagatactctaaagaacaaaagtgacaagctggaagagctggatggaaaagtgaagggctacgaagggcagctcagacagctccaggaagcagctcagggcccgacggtgaccatgacaaccaacgaactctaccaagcctatgtggacagtaagatcgacgccctgagagaggagctcatggagggcatggacagaaagctggctgacctgaaaaactcatgtgagtacaagctcactggcctccagcagcagtgtgatgactatgggagcagctacctgggagtgatagagctcataggggagaaggaaacaagcctgagaaaagaaataaataacctccgagcccggctacaggagccttcagcccaggcaaattgctgcgacagtgaaaagaatggtgacattggtcaacagatcaagacattggaccagaaaatcgagagagttgctgaagccaccagaatgctgaatggaagactggacaatgagtttgaccgccttatagttccagagccagatgtggattttgatgcaaaatggaatgaactcgatgcaaggatcaatgtgacggagaagaacgctgaagaacattgcttttacattgaggaaacccttcggggcgccattaatggagaggtgggtgacttgaagcagcttgttgatcagaaaatacagtctctggaagaccgtctggggagcgttctcctacagatgaccaataacactggtgcagagctcagtcccccaggggcagcagccctgccaggagtgtcagggtcaggagatgaacgggtcatgatggaattaaaccacctgaaggacggagttcaagttgttgaagacatttgcctgctgaacatccagggaaagcctcatgggatggaaggtgccttgccaaacagggaagaccgcgcagtacgcgacagcctgcaccttttgaaatctctcaacgacacgatgcacaggaagtttcaagaaaccgaacaaaccatccagaaacttcaacaggattttagttttctttattctcaattaaaccacacagaaaatgatgtgactcatcttcaaaaggaaatgagcaattgtagagcaggtgaaaacgctggcatgggtaggttcactaaggtgggtgagcaagaaaggacagtggacaccctgccgtccccccagcaccccgtggctcattgctgcagtcagctggaggagaggtggcagaggttgcagagccaggtcatctcggagctggatgcttgtaaggaatgcacgcagggggtccagagggaggtctccatggtggagggcagggtgtctcatatggagaaaacttgcagcaagctggactctatctcaggaaatcttcagaggatcaaggaggggctcaacaagcatgtcagcagcctgtggaactgtgtcaggcagatgaacggaacgctcaggtcgcattccagagacatttctggcctgaagaattcagtccagcagttctacagccacgtcttccagatttctactgatttgcaagatctggtcaaatttcagccatcagcaaaggcgccctcgcccccgccgcccgcagaggccccgaaggagccgctgcagcccgagcccgccccgccgaggcccagcggccccgcaaccgcagaggaccctgggcgacggcccgtcctgccccagcggccccccgaggagaggccgccccagccgccaggctccaccggggtcatcgcggagacgggccaggccgggccccccgcaggcgcaggcgtgtctgggcggggtctgccgcggggcgtggacggccagaccgggagcggcaccgtccccggcgcagaaggcttcgcgggcgcaccaggatacccgaagtcacctcctgtagcttccccaggagctccggtgtcttctctggtgtctttttctgcggggctcacccagaagcctttccccagtgatgggggcgttgtcctctttaacaaagtgctggtgaacgacggggatgtttacaaccccagcaccggggtcttcacggctccttatgatgggcgctacctgatcacggccaccctcacccccgagagagacgcctacgtggaagcagtgctgtcggtctccaacgccagcgtggcccagctgcataccgctgggtacaggagagagttcctggaataccaccgccctccaggagctttgcatacctgcgggggcccgggggcattccacctcatcgtgcacctgaaggcgggagatgcagtcaacgtcgtggtgactgggggcaagctggctcacacagactttgatgaaatgtactccacatttagtggggttttcttatatcctttcctttcccacctctaaggtggctggggagatgtcaggggaaagatagatagttgtaaaaactctaaagctttaatatattcggtttgtatgtaatggaagcacggggctagagtttccacataggccccaacataaaggccttccctcgctgttgaggccaccatgccttactgcatccagccaggctgcagggagtgaggcacacggtgaacatggccactgacttttctgccactctaactggacaactggaagacttggaaaggcctccacctgtatctacactctgagggccctggactgggcctgagcttgccacagaggctccgtctgactgtgggctgggaggagggaggcaggggagagccggtcacggtggctggtctttactgcagggcagcactgtggccagctgtctgtctttacactgcatgcagaagtttaaacactgaagtgccgaagtggcccgtgccgccgcacagagaccccgactttagtttgggctgttccacgcttggctcaccattgccgcctgggacttaacctgctcaggcgggccttcgcccagctgcaaatagggatgcgttagagactgttcccaaagcttgttgggctccttaaatggcatgtacaatttaagtgcaaagacagggagtgtcaataaagatggaaagccatttccagttaacttttgttaatttaa

SEQ ID NO: 545 - protein, 1053 aa, Human
MWQPRRPWPRVPWRWALALLALVGAGLCHAGPQPGYPARPSARNKNWCAYIVNKNVSCSVLEGSESFIQAQYNCAWNQMPCPSALVYRVNFRPRYVTRYKTVTQLEWRCCPGFRGGDCQEGPKDPVKTLRPTPARPRNSLKKATDNEPSQFSEPRKTLSPTGTAQPSWGVDPKEGPQELQEKKIQVLEEKVLRLTRTVLDLQSSLAGVSENLKHATQDDASRTRAPGLSSQHPKPDTTVSGDTETGQSPGVFNTKESGMKDIKSELAEVKDTLKNKSDKLEELDGKVKGYEGQLRQLQEAAQGPTVTMTTNELYQAYVDSKIDALREELMEGMDRKLADLKNSCEYKLTGLQQQCDDYGSSYLGVIELIGEKETSLRKEINNLRARLQEPSAQANCCDSEKNGDIGQQIKTLDQKIERVAEATRMLNGRLDNEFDRLIVPEPDVDFDAKWNELDARINVTEKNAEEHCFYIEETLRGAINGEVGDLKQLVDQKIQSLEDRLGSVLLQMTNNTGAELSPPGAAALPGVSGSGDERVMMELNHLKDGVQVVEDICLLNIQGKPHGMEGALPNREDRAVRDSLHLLKSLNDTMHRKFQETEQTIQKLQQDFSFLYSQLNHTENDVTHLQKEMSNCRAGENAGMGRFTKVGEQERTVDTLPSPQHPVAHCCSQLEERWQRLQSQVISELDACKECTQGVQREVSMVEGRVSHMEKTCSKLDSISGNLQRIKEGLNKHVSSLWNCVRQMNGTLRSHSRDISGLKNSVQQFYSHVFQISTDLQDLVKFQPSAKAPSPPPPAEAPKEPLQPEPAPPRPSGPATAEDPGRRPVLPQRPPEERPPQPPGSTGVIAETGQAGPPAGAGVSGRGLPRGVDGQTGSGTVPGAEGFAGAPGYPKSPPVASPGAPVSSLVSFSAGLTQKPFPSDGGVVLFNKVLVNDGDVYNPSTGVFTAPYDGRYLITATLTPERDAYVEAVLSVSNASVAQLHTAGYRREFLEYHRPPGALHTCGGPGAFHLIVHLKAGDAVNVVVTGGKLAHTDFDEMYSTFSGVFLYPFLSHL

SEQ ID NO: 546 - DNA, 1033 bp, Human
tttttttttttttttttttttatggtgttgtcgtgcaggtagaggcttactagaagtgtgaaaacgtaggcttggattaaggcgacagcgatttctaggatagtcagtagaattagaattgtgaagatgataagtgtagagggaaggttaatggttgatattgctagggtggcgcttccaattaggtgcatgagtaggtggcctgcagtaatgttagcggttaggcgtacggccagggctattggttgaatgagtaggctgatggtttcgataataactagtatggggataaggggtgtaggtgtgccttgtggtaagaagtgggctagggcatttttaatcttagagcgaaagcctataatcactgcgcccgctcataaggggatggccatggctaggtttatagatagttgggtggttggtgtaaatgagtgaggcaggagtccgaggaggttagttgtggcaataaaaatgattaaggatactagtataagagatcaggttcgtcctttagtgttgtgtatggttatcatttgttttgaggttagtttgattagtcattgttgggtggtgattagtcggttgttgatgagatatttggaggtggggatcaatagagggggaaatagaatgatcagtactgcggcgggtaggcctaggattgtgggggcaatgaatgaagcgaacagattttcgttcattttggttctcagggtttgttataattttttatttttatgggctttggtgagggaggtaggtggtagtttgtgtttaatatttttagttgggtgatgaggaatagtgtaaggagtaatggggtaattatggtggccatcccgcgtacctcggccgcgaccacgctaagggcgactcgcccttcgagcgccgcccggcaggtacagattactcccatcatctggcatagtgagacagtgccttcagccagatcatgagagtcttgatatacacacttccatgaatttttattccttaaaagggattacctgtcataaaatcaaccaagatacct

SEQ ID NO: 547 - DNA, 4301 bp, Human
gctgcgcgcacgcgaccgcatccgggctccttcggccccgccatgggctgctgcagctccgcttcctccgccgcgcagagctccaaacgagaatggaagccgctggaggaccgtagctgcacagacataccatggctgctgctcttcatcctcttctgcattgggatgggatttatttgtggcttttcaatagcaacaggtgcagcagcaagactagtgtcaggatacgacagctatggaaatatctgtgggcagaaaaatacaaagttggaagcaataccaaacagtggcatggaccacacccagcggaagtatgtattctttttggatccatgcaacctggacttgataaaccggaagattaagtctgtagcactgtgtgtagcagcgtgtccaaggcaagaactgaaaactctgagtgatgttcagaagtttgcagagataaatggttcagccctatgtagctacaacctaaagccttctgaatacactacatctccaaaatcttctgttctctgccccaaactaccagttccagcgagtgcacctattccattcttccatcgctgtgctcctgtgaacatttcctgctatgccaagtttgcagaggccctgatcacctttgtcagtgacaatagtgtcttacacaggctgattagtggagtaatgaccagcaaagaaattatattgggactttgcttgttatcactagttctatccatgattttgatggtgataatcaggtatatatcaagagtacttgtgtggatcttaacgattctggtcatactcggttcacttggaggcacaggtgtactatggtggctgtatgcaaagcaaagaaggtctcccaaagaaactgttactcctgagcagcttcagatagctgaagacaatcttcgggccctcctcatttatgccatttcagctacagtgttcacagtgatcttattcctgataatgttggttatgcgcaaacgtgttgctcttaccatcgccttgttccacgtagctggcaaggtcttcattcacttgccactgctagtcttccaacccttctggactttctttgctcttgtcttgttttgggtgtactggatcatgacacttctttttcttggcactaccggcagtcctgttcagaatgagcaaggctttgtggagttcaaaatttctgggcctctgcagtacatgtggtggtaccatgtggtgggcctgatttggatcagtgaatttattctagcatgtcagcagatgacagtggcaggagctgtggtaacatactattttactagggataaaaggaatttgccatttacacctattttggcatcagtaaatcgccttattcgttaccacctaggtacggtggcaaaaggatctttcattatcacattagtcaaaattccgcgaatgatccttatgtatattcacagtcagctcaaaggaaaggaaaatgcttgtgcacgatgtgtgctgaaatcttgcatttgttgcctttggtgtcttgaaaagtgcctaaattatttaaatcagaatgcatacacagccacagctatcaacagcaccaacttctgcacctcagcaaaggatgcctttgtcattctggtggagaatgctttgcgagtggctaccatcaacacagtaggagattttatgttattccttggcaaggtgctgatagtctgcagcacaggtttagctgggattatgctgctcaactaccagcaggactacacagtatgggtgctgcctctgatcatcgtctgcctctttgctttcctagtcgctcattgcttcctgtctatttatgaaatggtagtggatgtattattcttgtgttttgccattgatacaaaatacaatgatgggagccctggcagagaattctatatggataaagtgctgatggagtttgtggaaaacagtaggaaagcaatgaaagaagctggtaagggaggcgtcgctgattccagagagctaaagccgatggcttcgggagcaagttctgcttgaacctagccgacggttatggaaacccattgacattccaaaacaatatatacacacacacataaatcagccaaaatcagagaaaaggaacagggatttaataccttttttatgcttatttttgtcaaacatgtactcctttcatacgggtggcttttacaaggcaacttccgtcatttaatgttttcaactgtaattgtcttaatggaaatgttaaaattcatatctgattaacatttttaataacttagaggagattttaactttatttaaaaataggtaaaattattgtacctaattatgtctaaagtttattcaggggtaatttccctgatgtctgtataaaatcaagatcttattttactgatgcataagtcctagtgggtcaagactaggcatatgctttcagataaataaggaattactccaatcagttttccccaatcaaagaagccatgtcattttacttttagaaacatacaattgggcccaatatgggaattttcataatagttcatacatttgtcagccaacattaaaaggtaaccaactcctcaggtatttgtagtttaccctaacgcttctttaaaagaaagtaggtaaaaaaagaaaagggtagataatctttcgtatgcaaacttttcccttatattttgtctttctttcctttttgactttagtagcatcctccacacatttgtgtgcctgatttgaaaggaagctggggcacccagcgagtttagcctttaagtttctgtgtattgatttgcagattaagtaatgctgagaggaataaagaagggacagaaacatggaacataaagcattgaaaattccggtgcttgggcttcggcttcagagtaacgtcagtggcttagggttaaacggccattttattcaaatgcttgctatacaatctgaaaacacactggcaggtgctcctctccttggcaattcattgagtatccagagttctacgatgtttaactgaagaattggctaatgttttgatcctccagtgtgactgttgtttttgtttgggggtgggtttggggttttttgcttttttattcctgaagcttaccagatatgaatggctaatactccattgttctgcttgttgtaatggtgaatgctttaagaaaaaaaagtgtaatttgctaagaataattcatgatctgtttatgcgataactcctttttgttacaatttttttaaaaaaagctatttttgttaatgtaaagtaaatatttcagagcaaattttttaaacttattgcactaaatacaggctctgtacaaaaaaaaaaaaaaaaaagcctcagcattttatcattccatggaaggagaatcttttgaaagaaagcattgcctcctaccagaactagacagtgaattagatcggtattatggaaatgcatacaagtaatgtcactagggcttaataagcagccgtttgctaatgtgcttcctttcaaagggttggacctttaaattgctgcaaaaggtaaattgtatttttttttaagtattggtgttctttactctagctaggctaaaatttgctaaatgccttggtttcttttaaaagttcatgtaatatttctgatttttcagaatatttgcaataagagtctggattttaaaaaacacatgcatacacacaattaagagctcatgtcttagcaagatctgggaaaccaacattgcgagagtagctattttgaaagaataattctccagaagttaacatctaatatctagtatcaccaaacagtatcgctgttctcttttattcatttgaaatgaatataattatataactaacaattgtccaaatagatgagagagcaaatcatgtgagaaaattcagaataccatctgtttcatagccgcacagattttggactttcacaaacattgggaactaaatttagaattggcaaaagtctagaagatgggtatcaaaacagaagacattccaggagctagcaattttaagaggtgtccctccaaagtgacctgatggaagtcctgaacttggaaattaggttctactcacttggacatccctgcatcatggactgttgctgctccctgttccatatgctcgcaatctcagctatttggaagctaccaggaatgctttctaattatcatttgcaactagaactgtaatcagaaagaaattttgtatttttgtataacttgattgtgtgccattttatataacaggtcctgttttacaaataaattttgttttactaaaaaaaaaaaaaaaaaaaaaaa

SEQ ID NO: 548 - protein, 657 aa, Human
MGCCSSASSAAQSSKREWKPLEDRSCTDIPWLLLFILFCIGMGFICGFSIATGAAARLVSGYDSYGNICGQKNTKLEAIPNSGMDHTQRKYVFFLDPCNLDLINRKIKSVALCVAACPRQELKTLSDVQKFAEINGSALCSYNLKPSEYTTSPKSSVLCPKLPVPASAPIPFFHRCAPVNISCYAKFAEALITFVSDNSVLHRLISGVMTSKEIILGLCLLSLVLSMILMVIIRYISRVLVWILTILVILGSLGGTGVLWWLYAKQRRSPKETVTPEQLQIAEDNLRALLIYAISATVFTVILFLIMLVMRKRVALTIALFHVAGKVFIHLPLLVFQPFWTFFALVLFWVYWIMTLLFLGTTGSPVQNEQGFVEFKISGPLQYMWWYHVVGLIWISEFILACQQMTVAGAVVTYYFTRDKRNLPFTPILASVNRLIRYHLGTVAKGSFIITLVKIPRMILMYIHSQLKGKENACARCVLKSCICCLWCLEKCLNYLNQNAYTATAINSTNFCTSAKDAFVILVENALRVATINTVGDFMLFLGKVLIVCSTGLAGIMLLNYQQDYTVWVLPLIIVCLFAFLVAHCFLSIYEMVVDVLFLCFAIDTKYNDGSPGREFYMDKVLMEFVENSRKAMKEAGKGGVADSRELKPMASGASSA

SEQ ID NO: 549 - DNA, 3727 bp, Human
ctgctttcaaggtgtctagatacagagtgaagaatgtcacagtaggaagtgcactggactaggggagtcaggagacccgggttcttgtgttggcaccatcactcatgagctacgaggtgacttcaggctgccattggacctgtcaagtgcctgagtcatgtgataatgggctacattgcgcagggcccctgggccatctccacaggagatgccagaggacgagtgcccacttgctggtcttcacagagcacgctgaaatgagacggtttaagcggaagcatcttactgccattgactgccagcatttggctcggagtcacttggctgtgacccagcccttcggtcaaagatggacaaacagagatccgaaccatggtctctatcctaaaccgagaacaaaaagagggagtaggggtcagggaagtcaaagatgcatccctgagttcttcctagcaggcaagcagccgtgcaccaatgacatggccaaaagcaattctgttggccaggacagctgtcaggactctgagggtgacatgatctttcctgcagagagcagctgtgcactgcctcaggaaggcagtgcagggccgggctcaccagggtctgccccgccctccaggaagcggtcttggtcctctgaggaagagagtaaccaggctaccgggaccagccggtgggatggagtttctaagaaagctccacggcaccatttgtctgtgccatgcacaaggcctagggaggccaggcaagaagcagaggacagtacgtctcggctctctgcggagtctggtgaaaccgaccaagatgctggggacgtgggtcctgatcccattcctgactcatactatgggcttcttgggaccttgccctgccaggaagcactgagccacatttgcagcctgcctagtgaggtcctgaggcacgtgtttgccttcctcccggtggaagacctctattggaacctgagcttggtgtgccacttgtggagggagatcatcagtgacccgctgttcattccttggaagaagctgtaccatcgatacctgatgaatgaagagcaagctgtcagcaaagtggacggcatcctgtctaactgtggcatagaaaaggagtcagacctgtgtgtgctgaacctcatacgatacacagccaccactaagtgctctccgagtgtggatcccgagagggtgctgtggagtctgagggaccaccccctcctccccgaggctgaggcgtgtgtgcggcaacacctccccgacctctacgctgctgccgggggtgtcaacatctgggccctggtggcggctgtggtgctcctctccagcagtgtgaatgacatccagcgactgctcttctgcctccggagacccagctccacggtgaccatgccagatgtcaccgagaccctgtactgcatagccgtgcttctctacgccatgagggagaaggggattaacatcagcaataggattcactacaacattttctattgcctatatcttcaggagaattcctgcactcaggccacaaaagttaaagaggagccatctgtctggccaggcaagaaaaccatccaacttacacatgaacaacagctgattctgaatcacaagatggaacctctccaggtggtgaaaattatggcctttgccggcactgggaagacctcaacgctggtcaagtatgcagagaagtggtctcagagcaggtttctgtatgtgacattcaacaagagcatcgcaaagcaggccgaacgcgtcttccccagcaacgtcatctgcaaaaccttccactccatggcctacgggcacatagggcggaagtaccagtcaaagaagaagttgaatctcttcaagttaacacccttcatggtcaactccgtccttgctgaagggaagggtggattcataagagccaagcttgtgtgtaagactctagaaaacttctttgcctcggctgacgaagagctgaccattgatcacgtgcctatttggtgtaagaacagccaaggacagagagtcatggttgagcagagtgaaaaactgaatggtgtccttgaagcgagccgcctctgggataacatgcggaagctgggggagtgcacagaagaggcgcaccagatgactcatgacggctacttgaaactctggcagctgagcaagccttcgctggcctcttttgacgccatctttgtggatgaggcccaggactgcacaccagctatcatgaacatagttctgtctcagccatgtgggaaaatctttgtaggggacccgcaccagcagatctataccttccggggtgcggtcaacgccctgttcacagtgccccacacccacgtcttctatctcacgcagagttttcggtttggtgtggaaatagcttatgtgggagctactatcttggatgtttgcaagagagtcaggaaaaagactttggttggaggaaaccatcagagtggcattagaggtgacgcaaaggggcaagtggccttgttgtcccggaccaacgccaacgtgtttgatgaggccgtacgggtgacggaaggggaattcccttcaaggatacatttgattggggggattaaatcatttggattggacagaatcattgatatttggatccttcttcagccagaggaagaacggaggaaacaaaacctcgtcattaaagacaaatttatcagaagatgggtgcacaaagaaggctttagtggcttcaagaggtatgtgaccgctgccgaggacaaggagcttgaagccaagatcgcagttgttgaaaagtataacatcaggattccagagctggtgcaaaggatagaaaaatgccatatagaagatttggactttgcagagtacattctgggcactgtgcacaaagccaaaggcctggagtttgacactgtgcatgttttggatgattttgtgaaagtgccttgtgcccggcataacctgccccagcttccgcacttcagagttgagtcattttctgaggatgaatggaatttactgtatgttgcagtaactcgagccaagaagcgtctcatcatgaccaaatcattggaaaacattttgactttggctggggagtacttcttgcaagcagagctgacaagcaacgtcttaaaaacaggcgtggtgcgctgctgcgtgggacagtgcaacaatgccatccctgttgacaccgtccttaccatgaagaagctgcccatcacctatagcaacaggaaggaaaacaaggggggctacctctgccactcctgtgcggagcagcgcatcgggcccctggcgttcctgacagcctccccggagcaggtgcgcgccatggagcgcactgtggagaacatcgtactgccccggcatgaggccctgctcttcctcgtcttctgaggacaaggcgcacgttctccgcagtgcagagcagcttgccgaggaccccgcgtgaagaaagccagcgaggggggcttctgctccctgagactctgggttcacccacagcactttctgaggaagaggacaccagcccaagctggacctgccatttctccactccctacagacagccagtctccacttgcctcccctctggatgtatctggtcagggaagtgggggatgttcttttgataaaaaaaaaaaaaaaaatttatgtatttaaacttttattacaagatttcaattaaacaggcaccatagcactggcaaaaaaaaaaaaaaaaaaaaaaaaaa

SEQ ID NO: 550 - DNA, 2491 bp, Human
gctgacgggtttgaaatggcttcgatgttagccgggacccgactcagatcgatgctatagaagacaaacaaggaaaggttttttttccttttgcatcatggctcaatttggaggacagaagaatccgccatgggctactcagtttacagccactgcagtatcacagccagctgcactgggtgttcaacagccatcactccttggagcatctcctaccatttatacacagcaaactgcattggcagcagcaggccttaccacacaaactccagcaaactatcagttaacacaaactgctgcattgcagcaacaagccgcagctgcagcagctgcattacaacagcaatattcacaacctcagcaggccctgtatagtgtgcaacaacagttacagcaaccccagcaaaccctcttaacacagccagctgttgcactgcctacaagccttagcctgtctactcctcagccaacagcacaaataactgtatcatatccaacaccaaggtccagtcaacagcaaacccagcctcagaagcagcgtgttttcacaggggtggttacaaaactacatgatacatttggatttgtggatgaagatgtattctttcagcttagtgctgtcaaagggaaaaccccccaagtaggtgacagagtattggttgaagctacttataatcctaatatgccttttaaatggaatgcacagagaattcaaacactaccaaatcagaatcagtcgcaaacccagccattactgaagactcctcctgctgtacttcagccaattgcaccacagacaacatttggtgttcagactcagccccagccccagtcactgctgcaggcacagatttcagcagcttctattacaccactattgcagactcaaccacagcccttattacagcagcctcagcaaaaagctggtttattgcagcctcctgttcgtatagtttcacagccacaaccggcacgacgattagatcccccatcccgattttcaggaagaaatgacagaggggatcaagtgcctaacagaaaagatgatcgaagtcgtgagagagagagagaaagacgtagatcgagagaaagatcacctcagaggaaacgttcccgggaaagatctccacgaagagagcgagagcgatcacctcggagagttcgacgtgttgttccacgttacacagttcagttttcaaagttttctttagattgtcccagttgtgacatgatggaactaaggcgccgttatcaaaatttgtatatacctagtgacttttttgatgctcaatttacatgggtggatgctttccctttgtcaagaccatttcagctgggaaattactgcaatttttatgtaatgcacagagaagtagagtccttagaaaaaaatatggccattcttgatccaccagatgctgaccacttatacagtgcaaaggtaatgctgatggctagccctagtatggaagatttatatcataagtcatgtgctcttgctgaggacccacaagaacttcgagatggattccaacatcctgctagacttgttaagtttttagtgggcatggaaggcaaggatgaagctatggccattggaggccactggtctccttcgttggatggaccagacccagaaaaagatccctctgtgttgattaagactgctattcgttgttgtaaggctctgacaggcattgatctaagtgtgtgcacacaatggtaccgttttgcagagattcgctaccatcgccctgaggagacccacaaggggcgtacagttccagctcatgtggagacagtggttttatttttcccggatgtttggcattgccttcccacccgctcagagtgggaaaccctctcccgaggatacaagcagcagctggtcgagaagcttcagggtgaacgcaaggaggctgatggagaacaggatgaagaagagaaggatgatggtgaagctaaagaaatttctacacctacccattggtctaaacttgatccaaagacaatgaaggtaaatgacctccgaaaagaattagaaagtcgagctcttagttccaaaggattaaaatcccagttaatagcccgattgacaaaacagcttaaagtagaggaacaaaaagaagaacagaaggagttagagaaatctgaaaaagaagaggatgaggatgatgataggaaatctgaagacgataaagaggaagaagaaaggaaacgtcaagaggaaatagaacgccagcgtcgagaaagaagatatattttgcctgatgaaccggccatcattgtacatccaaattgggctgcaaaaagtggcaagtttgattgtagcatcatgtctttgagtgtcctattggactacagattagaggataataaagaacattcatttgaggtttcattgtttgcggaacttttcaacgaaatgcttcaaagagattttggtgtccgtatatacaaatcattactgtctcttcctgagaaagaggac

SEQ ID NO: 551 - DNA, 2637 bp, Human
  unsure 2024: unknown base
  unsure 2025: unknown base
  unsure 2026: unknown base
  unsure 2027: unknown base
  unsure 2028: unknown base
  unsure 2029: unknown base
  unsure 2030: unknown base
  unsure 2031: unknown base
  unsure 2032: unknown base
  unsure 2033: unknown base
  unsure 2034: unknown base
  unsure 2035: unknown base
  unsure 2036: unknown base
  unsure 2037: unknown base
  unsure 2038: unknown base
  unsure 2039: unknown base
  unsure 2040: unknown base
  unsure 2041: unknown base
  unsure 2042: unknown base
  unsure 2043: unknown base
  unsure 2044: unknown base
  unsure 2045: unknown base
  unsure 2046: unknown base
  unsure 2047: unknown base
  unsure 2048: unknown base
  unsure 2049: unknown base
  unsure 2050: unknown base
  unsure 2051: unknown base
  unsure 2052: unknown base
  unsure 2053: unknown base
  unsure 2054: unknown base
  unsure 2055: unknown base
  unsure 2056: unknown base
  unsure 2057: unknown base
  unsure 2058: unknown base
  unsure 2059: unknown base
  unsure 2060: unknown base
  unsure 2061: unknown base
  unsure 2062: unknown base
  unsure 2063: unknown base
  unsure 2064: unknown base
  unsure 2065: unknown base
  unsure 2066: unknown base
  unsure 2067: unknown base
  unsure 2068: unknown base
  unsure 2069: unknown base
  unsure 2070: unknown base
  unsure 2071: unknown base
  unsure 2072: unknown base
  unsure 2073: unknown base
  unsure 2074: unknown base
  unsure 2075: unknown base
  unsure 2076: unknown base
  unsure 2077: unknown base
  unsure 2078: unknown base
  unsure 2079: unknown base
  unsure 2080: unknown base
  unsure 2081: unknown base
  unsure 2082: unknown base
  unsure 2083: unknown base
  unsure 2084: unknown base
  unsure 2085: unknown base
  unsure 2086: unknown base
  unsure 2087: unknown base
  unsure 2088: unknown base
  unsure 2089: unknown base
  unsure 2090: unknown base
  unsure 2091: unknown base
  unsure 2092: unknown base
  unsure 2093: unknown base
  unsure 2094: unknown base
  unsure 2095: unknown base
  unsure 2096: unknown base
  unsure 2097: unknown base
  unsure 2098: unknown base
  unsure 2099: unknown base
  unsure 2100: unknown base
  unsure 2101: unknown base
  unsure 2102: unknown base
  unsure 2103: unknown base
  unsure 2104: unknown base
  unsure 2105: unknown base
  unsure 2106: unknown base
  unsure 2107: unknown base
  unsure 2108: unknown base
  unsure 2109: unknown base
  unsure 2110: unknown base
  unsure 2111: unknown base
  unsure 2112: unknown base
  unsure 2113: unknown base
  unsure 2114: unknown base
  unsure 2115: unknown base
  unsure 2116: unknown base
  unsure 2117: unknown base
  unsure 2118: unknown base
  unsure 2119: unknown base
  unsure 2120: unknown base
  unsure 2121: unknown base
  unsure 2122: unknown base
  unsure 2123: unknown base
  unsure 2124: unknown base
  unsure 2125: unknown base
  unsure 2126: unknown base
  unsure 2127: unknown base
  unsure 2128: unknown base
  unsure 2129: unknown base
  unsure 2130: unknown base
  unsure 2131: unknown base
  unsure 2132: unknown base
  unsure 2133: unknown base
  unsure 2134: unknown base
  unsure 2135: unknown base
  unsure 2136: unknown base
  unsure 2137: unknown base
  unsure 2138: unknown base
  unsure 2139: unknown base
  unsure 2140: unknown base
  unsure 2141: unknown base
  unsure 2142: unknown base
  unsure 2143: unknown base
  unsure 2144: unknown base
  unsure 2145: unknown base
  unsure 2146: unknown base
  unsure 2147: unknown base
  unsure 2148: unknown base
  unsure 2149: unknown base
  unsure 2150: unknown base
  unsure 2151: unknown base
  unsure 2152: unknown base
  unsure 2153: unknown base
  unsure 2154: unknown base
  unsure 2155: unknown base
  unsure 2156: unknown base
  unsure 2157: unknown base
  unsure 2158: unknown base
  unsure 2159: unknown base
  unsure 2160: unknown base
  unsure 2161: unknown base
  unsure 2162: unknown base
  unsure 2163: unknown base
  unsure 2164: unknown base
  unsure 2165: unknown base
  unsure 2166: unknown base
  unsure 2167: unknown base
  unsure 2168: unknown base
  unsure 2169: unknown base
  unsure 2170: unknown base
  unsure 2171: unknown base
  unsure 2172: unknown base
  unsure 2173: unknown base
  unsure 2174: unknown base
  unsure 2175: unknown base
  unsure 2176: unknown base
  unsure 2177: unknown base
  unsure 2178: unknown base
  unsure 2179: unknown base
  unsure 2180: unknown base
  unsure 2181: unknown base
  unsure 2182: unknown base
  unsure 2183: unknown base
  unsure 2184: unknown base
  unsure 2185: unknown base
  unsure 2186: unknown base
  unsure 2187: unknown base
  unsure 2188: unknown base
  unsure 2189: unknown base
  unsure 2190: unknown base
  unsure 2191: unknown base
  unsure 2192: unknown base
  unsure 2193: unknown base
  unsure 2194: unknown base
  unsure 2195: unknown base
  unsure 2196: unknown base
  unsure 2197: unknown base
  unsure 2198: unknown base
  unsure 2199: unknown base
  unsure 2200: unknown base
  unsure 2201: unknown base
  unsure 2202: unknown base
  unsure 2203: unknown base
  unsure 2204: unknown base
  unsure 2205: unknown base
  unsure 2206: unknown base
  unsure 2207: unknown base
  unsure 2208: unknown base
  unsure 2209: unknown base
  unsure 2210: unknown base
  unsure 2211: unknown base
  unsure 2212: unknown base
  unsure 2213: unknown base
  unsure 2214: unknown base
  unsure 2215: unknown base
  unsure 2216: unknown base
  unsure 2217: unknown base
  unsure 2218: unknown base
  unsure 2219: unknown base
  unsure 2220: unknown base
  unsure 2221: unknown base
  unsure 2222: unknown base
  unsure 2223: unknown base
  unsure 2224: unknown base
  unsure 2225: unknown base
  unsure 2226: unknown base
  unsure 2227: unknown base
  unsure 2228: unknown base
  unsure 2229: unknown base
  unsure 2230: unknown base
  unsure 2231: unknown base
  unsure 2232: unknown base
  unsure 2233: unknown base
  unsure 2234: unknown base
  unsure 2235: unknown base
  unsure 2236: unknown base
  unsure 2237: unknown base
  unsure 2238: unknown base
  unsure 2239: unknown base
  unsure 2240: unknown base
  unsure 2241: unknown base
  unsure 2242: unknown base
  unsure 2243: unknown base
  unsure 2244: unknown base
  unsure 2245: unknown base
  unsure 2246: unknown base
  unsure 2247: unknown base
  unsure 2248: unknown base
  unsure 2249: unknown base
  unsure 2250: unknown base
  unsure 2251: unknown base
  unsure 2252: unknown base
  unsure 2253: unknown base
  unsure 2254: unknown base
  unsure 2255: unknown base
  unsure 2256: unknown base
  unsure 2257: unknown base
  unsure 2258: unknown base
  unsure 2259: unknown base
  unsure 2260: unknown base
  unsure 2261: unknown base
  unsure 2262: unknown base
  unsure 2263: unknown base
  unsure 2264: unknown base
  unsure 2265: unknown base
  unsure 2266: unknown base
  unsure 2267: unknown base
  unsure 2268: unknown base
  unsure 2269: unknown base
  unsure 2270: unknown base
  unsure 2271: unknown base
  unsure 2272: unknown base
  unsure 2273: unknown base
  unsure 2274: unknown base
  unsure 2275: unknown base
  unsure 2276: unknown base
  unsure 2277: unknown base
  unsure 2278: unknown base
  unsure 2279: unknown base
  unsure 2280: unknown base
  unsure 2281: unknown base
  unsure 2282: unknown base
  unsure 2283: unknown base
  unsure 2284: unknown base
  unsure 2285: unknown base
  unsure 2286: unknown base
  unsure 2287: unknown base
  unsure 2288: unknown base
  unsure 2289: unknown base
  unsure 2290: unknown base
  unsure 2291: unknown base
  unsure 2292: unknown base
  unsure 2293: unknown base
  unsure 2294: unknown base
  unsure 2295: unknown base
  unsure 2296: unknown base
  unsure 2297: unknown base
  unsure 2298: unknown base
  unsure 2299: unknown base
  unsure 2300: unknown base
  unsure 2301: unknown base
  unsure 2302: unknown base
  unsure 2303: unknown base
  unsure 2304: unknown base
  unsure 2305: unknown base
  unsure 2306: unknown base
  unsure 2307: unknown base
  unsure 2308: unknown base
  unsure 2309: unknown base
  unsure 2310: unknown base
  unsure 2311: unknown base
  unsure 2312: unknown base
  unsure 2313: unknown base
  unsure 2314: unknown base
  unsure 2315: unknown base
  unsure 2316: unknown base
  unsure 2317: unknown base
  unsure 2318: unknown base
  unsure 2319: unknown base
  unsure 2320: unknown base
acccacgcgtcgcccacgcgtcgaggggttccgcccccccccgcgcatggggaggtaggctcggaccggcccgcggagctgctgcagtccttcgcgccctcctcgccctccccaccgacatcatgctccagttcctgcttggatttacactgggcaacgtggttggaatgtatctggctcagaactatgatataccaaacctggctaaaaaacttgaagaaattaaaaaggacttggatgccaagaagaaaccccctagtgcatgagactgcctccagcactgccttcaggatatactgattctactgctcttgagggcctcgtttactatctgaaccaaaagcttttgttttcgtctccagcctcagcacttctcttctttgctagaccctgtgttttttgctttaaagcaagcaaaatggggccccaatttgagaactacccgacatttccaacatactcacctcttcccataatccctttccaactgcatgggaggttctaagactggaattatggtgctagattagtaaacatgacttttaatgagtagtgtcttctttatcgtttgcgatttttactaccttttttcaaaagaaaaattgatgagttttgtatagctggtcagatacaaataatagtgacttcacagtttagtaattataatgggtacttgttaaacatttggtactaaattatgttgctgcaaagtaattaaaattagtatctagagctagtttctggtgaattattcatttattttgtactgttgttaggcagctctgtagttgctaatttaaccaataagtcaatttgctattcatgaagaaacgattctgagaatcctgtcaggaattggggaatgaaaaaatacacaaaataatggtctttgtcccagtagagttcatagtctatttagtgtgcatgtttttccttaatgatgtatttgatctgacttttttccttctcaaaagaatcatacttgggattacaggtacatttgatgttatatgatggataagtgaaaagtttttaaaggagattttataccttttcacattaaaaaaggtatttatattattactttgtagtgattgtcttaagaaaaaatatagcccaaatgtatagtaaaatcagcagctcaagaagaatttctgcttctctttgtagttgatgctttgttttttcctgcagtcagaaattccttgtatttgtcaaatgtataatcagcttgtattgtttttaaattaaaaaaaatttgaataattaacttttgccatgggacaagatacaaaagtaatttcatataaagggcctctcccacccctgttctctggctcctggctcctgtttgacaagttactgttaccacttcgccttatacttttgagaaagagtctgtgcctaaacaaacacgtgtaacacaaatagtaactatacatggaggtctagccctcgccttttttttttctttttttcttttttaatggagatcattctataccagcatgtaagtagcaaggaacctcattctttttttggctgcctaaaatttttttggaatagatataacataattgatttaatctgctactggtgaatgcttaggttgttcttttgctattacagtgataacttcaatcctaatgttattaagcatatcgattcagggtatagctataagatgaagtcctaaaagtataatttagactaaatacaaatacccatttcgctagctgttttgtttcagaggacttgttgagcagcttcactaataatgccatttttgaagacatggcaggttcagaatcaataaactggaagaattgttcagagcatcttttttcagacagtgatgacattgattctgtatatgataaagtgattctgcttctctttgacaacttgcatctctcctacatggaagtaagttttattcctgtcaatgttgtctttgtgtgtgacagattaggattaaattatggtttgacttttcctagcagcgtgatcatgggcaagtggcnnnnnnnnnnnnnnnnnnnnnnnnnnnnnnnnnnnnnnnnnnnnnnnnnnnnnnnnnnnnnnnnnnnnnnnnnnnnnnnnnnnnnnnnnnnnnnnnnnnnnnnnnnnnnnnnnnnnnnnnnnnnnnnnnnnnnnnnnnnnnnnnnnnnnnnnnnnnnnnnnnnnnnnnnnnnnnnnnnnnnnnnnnnnnnnnnnnnnnnnnnnnnnnnnnnnnnnnnnnnnnnnnnnnnnnnnnnnnnnnnnnnnnnnnnnnnnnnnnnnnnnnnnnnnnnnnnnnnnnnnnnnnnnnnnnnnnnnnaaacttttagattcatttaataggtaaattgcatgtcacgggtttgtagcttattctttcagaaactcttgcattatctgtagacgtggacgtaaatatccacctcatagggttttcataaaaaataattgagataatgtatgtaatgtttcacagtgctttgcagactatctaataaatagtagctattagtacaaacttgttgctttttggctagttctgcagtcacttttggaatcagtttatgaaccacacaaaaagtttgtcattattctgtagtcgctgtttttgatactgatgaaaatttacagtatcca

SEQ ID NO: 552 - DNA, 3944 bp, Human
tgtactgtcaggaatatcaagtgttctgagcctgcccagagtgccctagagttccagcacgaggcctgagatgcattacattcgcaatatccatatgaaaaggtctggggtctctagttccccaatggtgacttcttgttcatattataggaagcctgacgggagctctcctctaagcaaagcccagagttggactcatttcactataagaggctaaattcctcatactcacatcctgacaacattaggctataaggagcttggggaaaatccagccatccattcactcccgccccttagtggactgggttattttcaccacacagaaacactgcagggaaaatagccacttgtgtgaccctctttagctctttccctccctccctgatcaatgtgagcttatataattggcttaaatgaggaagtcagtagaaggggctagggccagccccaggctctgactcacgcaagggccagtgctgggtctgcagcctgtggccagggatgaacaagaatgttcctgttccccatgaggtttgctaaaagacccctttggtggtaggttgacaccccagcaagtggcctagcatggtccgaggcagccgcatagcctgtctgcatgatagcaggcttcagggatccagcttagctggaggcttgactgtgctagcctcggtggtacctgcactgtcattccatatgtcacaatccagggaagagaggctatcaccgagaagagttgtcagtaagaaggcaggacactctaacacgagcaaacctcatggggaacaggaacattcctgttcatccctggccacaggctgcagacccagcactggcccttgcgtgagtcagagcctggggctggccctagccccttctactgacttcctcatttaagccaattatataagctcacattgatcagggagggagggaaagagctaaagagggtcacacaagtggctattttccctgcagtgtttctgtgtggtgaaaataacccagtccactaaggggcgggagtgaatggatggctggattttccccaagctccttatagcctaatgttgtcaggatgtgagtatgaggaatttagcctcttatagtgaaatgagtccaactctgggctttgcttagaggagagctcccgtcaggcttcctataatatgaaaagaagtcaccattggggaactagagaccccagaccttttcatatggatatttgagaatgtaatgcatctcaggcctcgtgctggaactctagggcactctgggcaggctcagaacacttgatattcctgacagctacacacctgacatgcaggtacatacctgatcggtgtcatctcctaacaaggattttcagttcctcgggagagcaataatctttgtaggaaagacatccctgcaataggtgatatgtggtccttagaagttttattcctttactacttggaagaaaagttctttggtgattcttctctgcttttgaagatgatcaaaagcatcttcattgattttctgaaacgaaagccttgtctgaaaccaattaatacttgggaaacagctgggcttggaggagtagaatgccagagataaatccatggctcctgctctggctctcttctgcagaaatgagggcaacagtgaggccacttccctggcaaatgtgcagctcaggatagggaagcataagaccctctgtttaaaagagagtcaagtaggtaaccaaagccaagctctgtgcaaggtgctttggagttgtaaattgaggagtgcatccttgctgtcttgaaccattctgtttgcaatggtgagaccttacataacctagccttgcagggccgccacacaaccctggagtcctagagttggaggaacctttgtatccatctgacttctcattttgcagaatatgatgagaaagtagaggatcgctctgttcaccactcttgctattccattagtggggagatgcctgctagcatgtgtgaggggaacactctgatacactgggaagtatcggaaattcccagaaacacaaacataaaataactctcctagacccaggtactggggactgtctcagtccgtgtggcatgataaataaaaggttaggatcaagtctttgtatttttcaagatgtggtagctgattattcctgttttaagtactctgaaattgatctgtgatcaataatactaatatgttatcttttaccgtattctgcctctcactattgattttaattagttaggagtatttgagctgttatttcttgagcttaatatttttttagagttaactctttaaggagataatcatggctgtagacaaggccagggctggctgacgtgccttagaaggtttgaatgcaataaagcggtgtttggcgttctcctgcattgtagtgcgggtacaaaatgctatttgttcgtcatactgttgtcagcagatgagccgcccactacagacggctactgcccagggacctgcccaggccccacccaagggctcccaagggttgagatttctgcagacctatagccagcacacttagtcctgccctatatagagttcctcttcgggaagcttttgataaggaattctcagaccgataggatgtctgtctgggctttgctgcgggacagtctaactgtgggggctaggggaaagcaggagagtatcgatcaaagagtaagccacacacggataatcagttactagggatggaggtgtgagggctcattatattattcattttactgttgtatatgtttgaaaatgtctataataaaaagctttaaaaaaaaaaagaaacaaaaatagttcaggccagcaatgggccctccatgttcagtggattttatccttgtttcaattggggtaggagttccaggaggtgtggattggaggttgtctaaagaattgaactggcctttgtccctgcttcctgggagggagactttcagtccttgacatttccagggtaataggagtgtctttgttatttgtgaggccatgggatcacacctgagcttatgctaaaaggtgggatgactcagagctggggctggtcaccagacagactgaccatgtgattagaggtttgaggctttgagtcagcctgacctatggggcgggggactggaggctgagtttaatcatctggccagtgctttaatcagtacatcatgaaaccctaataaaaactctggacactaaagctcagcatagcttcctgggtggtgaagctgtggctatgccggcagggcagtgtgccctaattccacgaagagggggcatgggagcactgtgctcaagacccttccagacctttccctgtgtcttccttggcttgtggagctgatttgtatcctttataataaaactaatcataagtatagtcctgagttctgtgatttttagtgaatcattgaacctgaggaagatcatggtaccctcctgggattgtaggcagttggtcacaagcgctgatggcctgggatccccacatggggctggtgtctgaggtgagggcagccctgttggggactatgtcccttcgctggtggcatctgatctaactctgctggtcgttgttagaattgtggtgcggtaacaccaggtggtgtcagaacagaggcggtgggatctgcacaccttgagtaagcccttctcgaccagcctgttggaacaaaacacactactcttttcatgggagcctcccgagtttcttctcacctgtgtgaagtcccctttgtttactgtcctgagttttgttctcgctcatctccaacccctcttgtagttttttcttcctcactgtcactgtaaccataaaaatactcagtatgtcagtgatagacttgtctttctattcagagatgactcttcaactgtccggggacacttttttccaataaaaagttcaggatggt

SEQ ID NO: 553 - DNA, 3773 bp, Human
gctggctcgccggcctcagggcaggcaggcgggcgcgggagaccccgccggggccgagacttggggcgggcgacgaggaccaggttacggcctcctcgccatgtcctcggcctgcgacgcgggcgaccactaccccctgcacctcctagtctggaaaaacgactaccggcagctcgagaaggagctgcagggccagaatgtggaggctgtggacccacgaggtcgaacattattgcatcttgctgtttccttgggacatttggaatctgctcgagtcttactccgacataaagcagatgtgacaaaagaaaatcgccagggatggacagttttacatgaggctgtgagcactggcgatcctgagatggtgtacacagttctccaacatcgagactaccacaacacatccatggcccttgagggagttcctgagctgctccaaaaaattctcgaggctccggatttctatgtgcagatgaaatgggaattcaccagctgggtgcccttggtttctagaatatgcccaaatgatgtctgtcgcatctggaaaagtggtgccaaactgcgcgtcgatatcacattgctgggatttgaaaacatgagctggataagagggaggcgtagttttatatttaagggagaagacaactgggcggagttaatggaagtcaaccatgatgacaaagtggtcaccaccgaacgcttcgacctttcccaagaaatggagcgcctcactctggacttgatgaagccaaaaagcagggaagttgagcggcggctcacaagccctgtcattaacaccagcctcgatactaaaaatattgcttttgaaagaactaaatccggattctggggctggaggacagataaagcagaagttgttaatggttacgaagcaaaggtttacacagtaaacaatgtgaatgtgatcaccaaaatacgcacagaacatctgaccgaggaggaaaaaaagagatataaagcaggcaggaacccgctggaatctttgctgggaactgtggaacaccaatttggtgcacaaggggacctcaccacggaatgtgctactgcaaacaaccccacagccatcacgcctgatgagtacttcaatgaagagtttgatctgaaagacagggacattggaaggccgaaagagctgacgattagaacacagaagtttaaagcaatgttgtggatgtgtgaagagtttcccctctctctggtggagcaggtcattcccatcattgacctaatggctcgaacgagtgctcattttgcaagactgagagatttcatcaaattggaattcccacctggatttcctgtcaaaatagaaattcccttgtttcatgtcttaaatgcacggattacatttggaaatgttaatggctgtagcactgccgaagaatctgtatctcaaaatgtggaagggacccaggctgattcagcttcccacatcacaaactttgaggttgatcaatctgtgtttgaaattcccgaatcttactatgttcaagacaatggcagaaatgtgcatttgcaagatgaagattacgagataatgcagtttgccatccagcaaagtctgctggagtccagcaggagccaggaactttcaggaccagcttcgaatggagggatcagccagacaaacacctatgacgcccagtatgagagggccatccaggagagcctcctcaccagcacagaaggcctgtgccccagcgccctgagcgagacaagccgttttgataatgacttgcagctagccatggagctctctgccaaagagctggaggaatgggagctccggctccaggaggaagaggctgagctccagcaagtcttacagctgtcactcactgacaaatagacctttcagcctgtgagcctctgcacaaagcagaggctgtgggctgtcacagatgctgtgtcaaccagggccctagggctaagggcctgcaccttgcgtgcatgcagcaggcaacaactgccccttctttatgcagaggtgcagaaccagggactcctgggcccatccaggctgctccctggggtggagaagggaccagggattgcaggccccatctccaggctaaggggaggagagcatcatcactttccattagctgtattggcttgcaggtcacatttttactaccagctttagacaaaaccccaatccccgcaggtttgtagataaatttttatcaaggagtgataacaagacaagttattgcagagtcagggtgcttttatatataagagcagcagccgcctttgtaaagtgtgatctatgagaattggagacacttctttactgttcaccaaagaaatgggtaatctgtgctgatctccttatttttacctttttacagggtttctaggacattgtcattattcttcctccatctatctgattccattccttccacacccagctaaagttagaggagatacatatagaatctattttagattattgttaactatttgcatcaaattaagatacacaaatggccatggatgttgccttagccttaaacattactaatagtttcacatcacctcactgcacgcatcgaaggatctgatttgaatttgtaaaggcaattcttttgagagcaggattctccaggctaaatcaaaggcagctaatcctgtccctgaaggagcagctaggggaacctgaggcttgttcttgaagtgggcaagctggccaaaatattggaacacacagaaccaaaccaggtgtgttctacacctgcatgagtgaaggatttccacgtagacacctaggaagagcccgcatgccctagactcactccagaggaaggattgatttgcaaccagaaagggagctgaaaaccacggagctccatggctcttcattcaaaagggaaaataatgattccacgttgctttttagagttcaaatcaacatctttctggataaatctattttttaacaatctttttattatttgtaaaagatataaaaacaactcccatcagtagcaatacaaggttatacattttaaccagattttctcaggccttttttggatacctttagtagttaactctcttttgtcaaaccctcttgtatataaccatcgcacaacatacagaaccctggggaatacagccaagggcactgctcactgtggcccgtgtattcattcccacaggctgcactgaaataacctggtaaacaacaccctcctccattttgcgtctatttcttctattgtgcttctttggggataggaagagaaacataactactgttccaggtaacgtctgtatcatacagttagtgttgccagtgaaacgttcccagatacaaagaattgtgcttttaattccatttcacaatctgttttgttttttttttttgtcattgtctgaccaaaattccttctgcacatgaggccagtataggcaacgtcacatttgtttgtttcaaatatgcagtgtggtattttgtttactttgcatttaccgtgagcaaagatacttcttggaatggctgcagtgaggccgtgtcattggctcacaaaagtgactcataggtaatttctgtgtttgcattccactgctctgctccctaaggtccttgactttctccccaggaattcacttaaaaagggactgagcattgtgtcaacctgttgcagtgtttttcatatatgtgttcactctaaaaatgcaaataaagactgcttccttagagggtgctcatacaaaaaaaaaaagaaaaaaaaaaaaaa

SEQ ID NO: 554 - DNA, 2362 bp, Human
ggggggctcgcccgggggccatggcagcagcggctactgcagccgagggggtccccagtcgggggcctcccggggaagtcatccatctgaatgtgggaggcaagagattcagtacctctcgccagactctcacctggatcccagactccttcttctccagtcttctgagcggacgcatctcgacgctgaaagatgagaccggagcaatcttcatcgacagggaccctacagtcttcgcccccatcctcaacttcctgcgcaccaaagagttggatcccaggggtgtccacggttccagcctcctccatgaagcccagttctatgggctcactcctctggttcgtcgcctgcagcttcgagaggagttggatcgatcttcttgtggaaacgtcctcttcaatggttacctgccgccaccagtgttcccagtgaagcggcggaaccggcacagcctagtggggcctcagcagctaggaggacggccagcccctgtccgacggagcaacacgatgccccccaaccttggcaatgcagggctgctgggccgaatgctggatgagaaaacccctccctcaccctcaggacaacctgaggagccggggatggtgcgcctggtgtgtggacaccataattggatcgctgtggcctatacccagtttctagtctgctacaggttgaaggaagcctctggctggcagctggtgttttccagcccccgcctggactggcccatcgaacgactggcgctcacagcccgggtgcatggtggggctttgggtgaacatgacaagatggtggcagcagccaccggcagcgagatcctgctatgggctctgcaggcggaaggcggtggctccgagataggggtctttcatctgggggtgcctgtggaggccttgttcttcgtcgggaaccagctcattgctacaagccacacagggcgcatcggggtgtggaatgccgtcaccaagcactggcaggtccaggaggtgcagcccatcaccagttatgacgcggcaggctccttcctcctcctgggctgcaacaacggctccatttactacgtggatgtgcagaagttccccttgcgcatgaaagacaacgacctccttgtcagcgagctctatcgggacccagcggaggatggggtcaccgccctcagtgtctacctcacccccaagaccagtgacagtgggaactggatcgagatcgcctatggcaccagctcagggggcgtgcgggtcatcgtgcagcacccggagactgtgggctcggggcctcagctcttccagaccttcactgtgcaccgcagccctgtcaccaagatcatgctgtcggagaagcacctcatctcagtctgtgccgacaacaaccacgtgcggacatggtctgtgactcgcttccgcggcatgatttccacccagcccggctccaccccactcgcttcctttaagatcctggctctggagtcggcagatgggcatggcggctgcagtgctggcaatgacattggcccctacggtgagcgggacgaccagctagtgttcatccagaaggtggtgcccagtgccagccagctcttcgtgcgtctctcatctactgggcagcgggtgtgctccgtgcgctccgtggacggctcacccacgacggccttcacagtgctggagtgcgagggctcccggcggctcggctctcggccccggcgctacctgctcactggccaggccaacggcagcttggccatgtgggacctaaccaccgccatggacggcctcggccaggcccctgcaggtggcctgacggagcaagagctgatggaacagctggaacactgtgagctggccccgccggctccttcagctccctcatggggctgtctccccagcccctcaccccgcatctccctcaccagcctccactcagcctccagcaacacctccttgtctggccaccgtgggagcccaagccccccgcaggctgaggcccggcgccgtggtgggggcagctttgtggaacgctgccaggaactggtgcggagtgggccagacctccgacggccacccacaccagccccgtggccctccagcggtctcggcactcccctcacacctcccaagatgaagctcaatgaaacttccttttgaacaacgcagctgccatgatgccttgggatgccctggtcctgggggactcaggtgcctccctgattcctgtgggaaccccgggttcagggccagggcctccttggaataaatggttattgttactaggtccccaccttccctcttttctggaagccaaagtcagcctccccaataaagtcctcactgcctaaaaaaaaaaaaaaaaaaaaaaaaaaaaa

SEQ ID NO: 555 - protein, 707 aa, Human
MAAAATAAEGVPSRGPPGEVIHLNVGGKRFSTSRQTLTWIPDSFFSSLLSGRISTLKDETGAIFIDRDPTVFAPILNFLRTKELDPRGVHGSSLLHEAQFYGLTPLVRRLQLREELDRSSCGNVLFNGYLPPPVFPVKRRNRHSLVGPQQLGGRPAPVRRSNTMPPNLGNAGLLGRMLDEKTPPSPSGQPEEPGMVRLVCGHHNWIAVAYTQFLVCYRLKEASGWQLVFSSPRLDWPIERLALTARVHGGALGEHDKMVAAATGSEILLWALQAEGGGSEIGVFHLGVPVEALFFVGNQLIATSHTGRIGVWNAVTKHWQVQEVQPITSYDAAGSFLLLGCNNGSIYYVDVQKFPLRMKDNDLLVSELYRDPAEDGVTALSVYLTPKTSDSGNWIEIAYGTSSGGVRVIVQHPETVGSGPQLFQTFTVHRSPVTKIMLSEKHLISVCADNNHVRTWSVTRFRGMISTQPGSTPLASFKILALESADGHGGCSAGNDIGPYGERDDQLVFIQKVVPSASQLFVRLSSTGQRVCSVRSVDGSPTTAFTVLECEGSRRLGSRPRRYLLTGQANGSLAMWDLTTAMDGLGQAPAGGLTEQELMEQLEHCELAPPAPSAPSWGCLPSPSPRISLTSLHSASSNTSLSGHRGSPSPPQAEARRRGGGSFVERCQELVRSGPDLRRPPTPAPWPSSGLGTPLTPPKMKLNETSF

SEQ ID NO: 556 - DNA, 923 bp, Human
agtggagtgaggggtaacaagatggcgaccgagacggtggagctccataagctaaagcttgccgaactaaagcaagaatgtcttgctcgtggtttggagaccaagggaataaagcaagatcttatccacagactccaggcatatcttgaagaacatgctgaagaggaggcaaatgaagaagatgtactgggagatgaaacagaggaagaagaaacaaagcccattgagctccctgtcaaagaggaagaaccccctgaaaaaactgttgatgtggcagcagagaagaaagtggtgaaaattacatctgaaataccacagactgagagaatgcagaagagggctgaacgattcaatgtacctgtgagcttggagagtaagaaagctgctcgggcagctaggtttgggatttcttcagttccaacaaaaggtctgtcatctgataacaaacctatggttaacttggataagctgaaggaaagagctcaaagatttggtttgaatgtctcttcaatctccagaaagtctgaagatgatgagaaactgaaaaagaggaaggagcgatttgggattgtcacaagttcagctggaactggaaccacagaggatacagaggcaaagaagaggaaaagagcagagcgctttgggattgcctgatgaagagttcctgatactttctgttctccagtgttttccatttctctccttcttcttggtcacatatatgcctaaatgcacagtcatgtgcctacgtcctgcctcgcaatgagggagcatgtaccccaggtacatccatgaactgcggcagcagtttgacttattgctgtttcagctttaaggttgttgtgtttttgtttttgattatgttgcttgttaataaaaaaaaatagaaaagtaaaaaaaaaaaaaaaaaaaaaaaaaaaaaa

SEQ ID NO: 557 - DNA, 7334 bp, Human
cagtgactcagaaaattcaaataagagaataatagataattcctcagaacagaagccagagaatgaattgaaaaataaaaatacttcaaaaataaatggagaagaaggaaaaccccataataatgagaaggcaggagaagagaccctaaaaaatagccagcctccctgggatcaaatacaggaagataaaaaacatgaagaagcagagaagcggaagtctgttgacactcagcttcaagaagatatgattattcatacgtcagaacagtccacagtttctgatcataattctaatgatttacttcctcaggaatgcaatatggataaaacacataccatggaattgctaccaaaggagaagtttgtatccagaccacccacaccaaaatgtgttattgatattacaaatgacactaatttagaaaaggtggctcaggaaaactcaagtacctttggccttcagacacttcagaaaatggatcctaatgttagtgattcaaaacactctattgcaaatgcaaaattcttggaaacagcaaaaaaagattctgaccagagctgggtcagtgatgtagttaaagtggatctaacccaatcaagtgttacaaatgcttcttcaggaaatgatcacttgaacatggaaaaagagaagtatgtctcttacatttctcctttaagtgcagtttctgtcatggaagataagctgcataagcgaagtccacctccagagactataaaatctaaacttaatacttcagtagatactcacaagataaaatccagcccatcacctgaagttgttaaacccaaaataactcattctcctgattctgtaaagtctaaggccacttatgtgaacagccaagctactggtgaaagaagattggcaaataagatagaacatgagctatcaagatgcagttttcatccaattcctactcgaagcagtacattagaaactacaaagagtcctcttatcattgataaaaatgagcattttacagtttacagagatcctgcacttattgggtcagaaacaggagctaatcatatttcacctttcctaagccagcatccttttcctcttcactcctcatctcatagaacctgtttaaatccaggtacccatcatcctgccttaactcctgcaccccatttactagccggatcatctagtcaaactccattacctaccattaacactcatcctctgactagtggtccacaccatgctgttcatcaccctcatttacttcccactgtgttacctggagtgcctactgcctccttacttggtggccacccacgactagagagtgctcatgccagcagcttgagccacttagcgctagcacaccagcaacaacaacagttgttacagcaccagtcacctcatcttcttggacaagcccatccttctgcttcatataatcagcttggactttatccaattatttggcagtatccaaatggaacacatgcatactcaggacttggtttgccttcttctaagtgggttcacccagaaaatgcagttaatgctgaagcttcattaaggaggaattctcccagtccttggctacatcagcccacccctgtgacctcagcagatggtattggattacttagtcacattcctgtcagaccttccagtgcagagcctcatcggcctcttaaaattacagcccattccagtccaccattgacaaaaactttagtagatcatcataaggaagaattagaaagaaaagcttttatggaaccattacggtctgttgcatccacatcagccaaaaatgacctggatctaaataggtcacagactggaaaagattgtcacttacataggcattttgtggatccagtattaaatcagttacagaggccaccccaggagactggagagaggttaaacaaatacaaagaggaacaccgtcgaattcttcaagaaagtattgatgttgctccctttacaactaaaatcaagggacttgagggtgagagagagaattattccagagtggcatcatcatcttccagtcctaaaagccatatcatcaaacaagatatggatgtagaacgctcagtatcagatctttataaaatgaagcactcagtgcctcagagtttaccccaaagtaactatttcactacattgtctaatagtgtggtcaatgaaccaccaagatcatacccatccaaagaagtttcaaatatttacggtgataaacagagtaatgcccttgcagcggcagcagctaatcctcaaactctgacttcatttataacatctctttcaaagcctccacctttgattaaacaccaaccagaaagtgaaggtttagtaggcaagataccagaacatcttccacatcagattgcatctcactcagtaacaaccttcagaaatgattgtaggagtcctacccatttgacagtttcttctacaaatacactccgcagtatgcctgcattacatagagcaccagtatttcacccaccaatccatcacagcctggaaagaaaggaaggcagctatagtagtctttcccctccaactttaactccggtgatgccagtaaatgctggtggtaaagttcaagaatcacagaagcctccaactctaatacccgaaccaaaagactcccaggcaaattttaagagttcttcagaacagagtttgacggagatgtggagacctaataataacctcagcaaagagaaaactgaatggcatgtggagaaaagcagcggaaagttacaggctgctatggcatctgtcattgtgcgtccatcttctagtacaaaaactgatagtatgccagcaatgcagttagcttctaaagatcgagttagtgaaagatcttcagctggggcacataaaacagattgcctcaaactagcagaagccggagaaactggaagaatcattttgccaaatgtgaattcagacagtgttcacacaaaatctgaaaaaaactttcaggctgtctcacagggcagtgttcccagttcagtcatgtctgctgtaaatacgatgtgtaataccaaaacggatgtaatcacatctgctgccgatactaccagtgtttccagctggggtggttcagaagtaatttcctctttatcaaataccattttggcctctacatcatcagaatgtgtatcttcaaaaagtgtcagtcagccagtggctcaaaaacaagaatgcaaggtcagcaccacagcaccagttacattagccagtagtaagacaggaagtgttgttcaacccagttctgggttctcaggcacaactgattttatccatttaaaaaagcacaaggcagcattggctgcagctcagtataaaagtagtaatgccagtgagactgaacctaatgctataaaaaatcagacactttcagcctcccttcctctggatagcactgtaatctgtagtacaattaacaaagcaaactctgtaggaaatgggcaagcttcccagacaagtcaaccaaactaccatactaaactgaaaaaggcctggctcaccagacactcagaagaagataaaaatactaataaaatggaaaattcagggaattctgtatcagaaattattaagccatgttctgtcaacttaatagcctctacatctagtgatatacaaaatagtgtagatagtaagatcatagttgataaatatgtaaaagatgataaagtcaacaggagaaaagccaaaagaacttatgaatctggctctgaaagtggagactcagatgaaagtgaaagcaagtcagagcaaaggactaaaagacaacctaagccaacttacaaaaagaagcaaaatgatttgcaaaagagaaaaggtgaaatagaagaagatttgaaacccaatggagttctcagcaggagtgccaaagaaagaagtaaactgaagttgcaaagcaacagtaatactggcattcctcgttcagtattgaaagattggcgtaaagtcaagaagctgaagcaaactggggaatcctttttacaggatgactcctgctgtgagatagggcctaatttacaaaagtgtcgagaatgtagacttattcgcagtaaaaaaggagaagaaccagctcactcaccagtattttgtagattttactactttagacggttgtcatttagtaaaaacggagtagttagaatagatggtttctcttctcctgaccaatatgatgatgaagctatgagtttgtggacacatgaaaattttgaagatgatgaactagatatagagacttctaaatatatcttggatataataggtgataagttctgtcaattagtaacatctgaaaaaacagctttgtcctgggtgaaaaaggatgccaaaattgcctggaaaagagcagtgagaggagtccgggagatgtgtgatgcatgtgaagcaacattgtttaacattcactgggtctgccaaaaatgtggatttgtggtctgcttagattgttacaaggcaaaggaaaggaagagttctagagataaagaactatatgcttggatgaagtgtgtgaagggacagcctcatgatcacaaacatttaatgccaacccaaattatacctggttctgttttgacagatcttctagatgccatgcacactcttagggaaaaatatggtattaaatcccattgtcattgtactaacaaacagaatttacaagttggaaattttcctacaatgaatggtgtatctcaagttttacagaatgttcttaatcacagtaataaaatttctctgtgcatgcctgagtctcagcagcaaaatactcctccgaagtctgagaaaaatggtggcagcagcccagagagtgatgtaggcacagataacaagttaactcctccagaatcccagtcaccactgcactggttagcagatcttgcagagcaaaaagccagagaggaaaaaaaagaaaacaaagaacttacccttgaaaaccaaattaaagaagaaagagaacaagacaactctgaatctccaaatggcagaacatcacctcttgtgtcccagaataatgaacaaggctcaaccttacgggatttgctgactacaacagctggaaagctacgtgtggggtctacagatgctggcattgcctttgccccagtatattcaatgggagccccaagtagcaaaagtggacggactatgcctaacattcttgatgacataattgcttcagttgttgaaaacaaaattccaccaagtaaaacctccaagataaatgtaaaaccagagcttaaagaagagcctgaagaaagcataatatctgcagtggatgaaaataataaattatacagtgatataccacattcttggatctgtgagaagcatattttatggcttaaggattataagaatagcagtaattggaagcttttcaaagaatgttggaaacaaggacagcctgcagtggtttctggtgtgcataagaaaatgaacattagcctatggaaggcggaatcaattagtcttgattttggagaccaccaagctgatctcctgaactgcaaagatagcatcatttcaaatgccaatgttaaggaattctgggatggttttgaagaagtttcaaaacggcagaaaaacaagagtggagaaacagttgttttaaaattgaaagattggccttcaggagaagacttcaagactatgatgccagcaagatacgaagatcttttaaaaagtctgccattgccagaatattgtaatccagaaggaaaattcaatttggcctctcatttgccaggattttttgtacgtcctgatctaggacccaggttgtgcagtgcctatggtgtagttgctgctaaagatcatgatataggaacaacaaatctccatattgaagtttctgatgttgtaaatatactagtttatgttggcatagcaaaaggaaatggcattctctcaaaagcaggaattctcaagaaatttgaggaagaagatttggatgacattttaaggaaaagattgaaggactcaagtgaaatacctggtgctctgtggcatatttatgctgggaaagatgttgacaagataagggaatttcttcaaaagatttcaaaagaacaaggccttgaagttctaccagaacatgatccaatacgtgaccaaagttggtatgtgaacaaaaagctccgtcaaaggctgcttgaagaatatggagtcagaacctgtactcttattcagttccttggtgatgctattgttttgccagcgggagcacttcatcaggttcagaattttcacagctgtattcaggtaactgaagattttgtgtctccagaacatcttgtagagtcatttcatttaacacaggaactgagacttttgaaggaagaaatcaattatgatgataaactacaggttaaaaatattttgtatcatgcagtcaaagaaatggtgagagccttgaagatacacgaggatgaagtagacgatatggaagaaaattaagtgtgatccagtttgatatttttaggttgttgaactgggattacttaaccttgaatgatgatatgtatgcacactgactttaagcttcataaaaccatcagtgccaagaaattctctttgtagtaattacttgttactgacaccacagcagtatagcatatgtcacagctcctgtgattcaatgttataaaacaagcagaattttaaaagcagcactatatagctgttttgtattatagtgtatatgatgtttgtgaaaatgccagatttaaaatgatgtatttatttttggtaaaaaataaaaaattctatgctatattgttgatcaagtgtaaatgtgaccttgtacagtttactaaaattactgatatttttcactacattgagacagttactgtgagaataggacacaaacaccagctattgcctgcatctgggaaattgctgaatcgcacagcagtcatgtcataatcagaaaattactgccaaataattgtaaaatttgtaaagtataaagtatataaagtagatactaaatacagacacttcaatattttgttgaagctattgactgtacaattaaacattttcaaaaggtgtaatttatttaaaattgtctcattttggtaaaatttatgtgaacttttaaagctaaatattaaacttaatatgctatgtaaatatatacatatatacatttaatgatgtatttttttaaaacattggcttgcttttgttaaagtgcaagtgttacatatggctttgtacattaaagttgaaaggggttttacattttccattaaaaggactttatcaaaaattgagaaaaaaaaaaaaaaaaaaa

SEQ ID NO: 558 - protein, 2162 aa, Human
SDSENSNKRIIDNSSEQKPENELKNKNTSKINGEEGKPHNNEKAGEETLKNSQPPWDQIQEDKKHEEAEKRKSVDTQLQEDMIIHTSEQSTVSDHNSNDLLPQECNMDKTHTMELLPKEKFVSRPPTPKCVIDITNDTNLEKVAQENSSTFGLQTLQKMDPNVSDSKHSIANAKFLETAKKDSDQSWVSDVVKVDLTQSSVTNASSGNDHLNMEKEKYVSYISPLSAVSVMEDKLHKRSPPPETIKSKLNTSVDTHKIKSSPSPEVVKPKITHSPDSVKSKATYVNSQATGERRLANKIEHELSRCSFHPIPTRSSTLETTKSPLIIDKNEHFTVYRDPALIGSETGANHISPFLSQHPFPLHSSSHRTCLNPGTHHPALTPAPHLLAGSSSQTPLPTINTHPLTSGPHHAVHHPHLLPTVLPGVPTASLLGGHPRLESAHASSLSHLALAHQQQQQLLQHQSPHLLGQAHPSASYNQLGLYPIIWQYPNGTHAYSGLGLPSSKWVHPENAVNAEASLRRNSPSPWLHQPTPVTSADGIGLLSHIPVRPSSAEPHRPLKITAHSSPPLTKTLVDHHKEELERKAFMEPLRSVASTSAKNDLDLNRSQTGKDCHLHRHFVDPVLNQLQRPPQETGERLNKYKEEHRRILQESIDVAPFTTKIKGLEGERENYSRVASSSSSPKSHIIKQDMDVERSVSDLYKMKHSVPQSLPQSNYFTTLSNSVVNEPPRSYPSKEVSNIYGDKQSNALAAAAANPQTLTSFITSLSKPPPLIKHQPESEGLVGKIPEHLPHQIASHSVTTFRNDCRSPTHLTVSSTNTLRSMPALHRAPVFHPPIHHSLERKEGSYSSLSPPTLTPVMPVNAGGKVQESQKPPTLIPEPKDSQANFKSSSEQSLTEMWRPNNNLSKEKTEWHVEKSSGKLQAAMASVIVRPSSSTKTDSMPAMQLASKDRVSERSSAGAHKTDCLKLAEAGETGRIILPNVNSDSVHTKSEKNFQAVSQGSVPSSVMSAVNTMCNTKTDVITSAADTTSVSSWGGSEVISSLSNTILASTSSECVSSKSVSQPVAQKQECKVSTTAPVTLASSKTGSVVQPSSGFSGTTDFIHLKKHKAALAAAQYKSSNASETEPNAIKNQTLSASLPLDSTVICSTINKANSVGNGQASQTSQPNYHTKLKKAWLTRHSEEDKNTNKMENSGNSVSEIIKPCSVNLIASTSSDIQNSVDSKIIVDKYVKDDKVNRRKAKRTYESGSESGDSDESESKSEQRTKRQPKPTYKKKQNDLQKRKGEIEEDLKPNGVLSRSAKERSKLKLQSNSNTGIPRSVLKDWRKVKKLKQTGESFLQDDSCCEIGPNLQKCRECRLIRSKKGEEPAHSPVFCRFYYFRRLSFSKNGVVRIDGFSSPDQYDDEAMSLWTHENFEDDELDIETSKYILDIIGDKFCQLVTSEKTALSWVKKDAKIAWKRAVRGVREMCDACEATLFNIHWVCQKCGFVVCLDCYKAKERKSSRDKELYAWMKCVKGQPHDHKHLMPTQIIPGSVLTDLLDAMHTLREKYGIKSHCHCTNKQNLQVGNFPTMNGVSQVLQNVLNHSNKISLCMPESQQQNTPPKSEKNGGSSPESDVGTDNKLTPPESQSPLHWLADLAEQKAREEKKENKELTLENQIKEEREQDNSESPNGRTSPLVSQNNEQGSTLRDLLTTTAGKLRVGSTDAGIAFAPVYSMGAPSSKSGRTMPNILDDIIASVVENKIPPSKTSKINVKPELKEEPEESIISAVDENNKLYSDIPHSWICEKHILWLKDYKNSSNWKLFKECWKQGQPAVVSGVHKKMNISLWKAESISLDFGDHQADLLNCKDSIISNANVKEFWDGFEEVSKRQKNKSGETVVLKLKDWPSGEDFKTMMPARYEDLLKSLPLPEYCNPEGKFNLASHLPGFFVRPDLGPRLCSAYGVVAAKDHDIGTTNLHIEVSDVVNILVYVGIAKGNGILSKAGILKKFEEEDLDDILRKRLKDSSEIPGALWHIYAGKDVDKIREFLQKISKEQGLEVLPEHDPIRDQSWYVNKKLRQRLLEEYGVRTCTLIQFLGDAIVLPAGALHQVQNFHSCIQVTEDFVSPEHLVESFHLTQELRLLKEEINYDDKLQVKNILYHAVKEMVRALKIHEDEVDDMEEN

SEQ ID NO: 559 - DNA, 2108 bp, Human
ctgtcaccaagcaggagagttaaggattcaccatgagctgggaaatgcttttgccatgagtatgagcaaattccctctttccctgaatcatggacattctagattaaaagaacattttttgtgctcttaacaagaaaaccatggccctcctttgttcaagtatcacaagaaataaacccacagctccagagaaggtgaccattctcagaactccagctattcactctccagggagaaggacctcaaatcgccactctttgggcggcaggtgcggtccccacggccggctctacgaggaagagttctggctcttttgtccactgagatggtcttggtttttcacttaacaaattttttaatggaatctttgtttttgttctccatcttgtttgttagagtctctcggcctttatttacaaattccttgcaactagagcgctccttccccaagatatggtagtgagagtaatttttcattgtagctgtagtctccatcagtaacagcaggccctggaagacttgatcacctttttctgtgtcattttcagtcaaagagggcctctcttacatcttgtttgctttcaaatccccaaatatcatctccatctcccaattaattttattctctctttcctctgtattcgctttctcctgttttttttttaaaaaaaagcatgaaaaaggaagagaaaaagtttgatatgccaaggacagattttgaaacagacttggtaaatgttttccttagctccttcatgggcatgctggtgaaagaataaatacatccaattaaagctcatgctggggtcggggagaagaggatactgaaacatttgtgaaatgtatgaatgcacttctgtaaccagatacttctgttcttctgttcaaattgtggggtttttgttacagttaggacgcccatgaagatttaggggtgaaaaaaacagcagagtatttattaaactacagcattgtacaattagcttagtaacactatggaataagctaaaacatatcacagtttttacatgggccaaaacatgaattgagtatgtggtcacatgaaaacacgcatgaatgaataaaacactctttggtggtgactgaggcatcattagaaggcccagacgatttccactattcacagcatttccttttctcagaaggactctttatatttccatgtaaatctagatctttggagcaattaagatggaattacaatttctagggagcattttaaggaaaatgttttggctttttcataattttatgtcttacagtatggaattataatacgaaaatctttatatgagttttggcttcttggtatttgtacttattcaggggaaaaagtctttcgattacttatgcctctatagagcttaatttcttgagaaattcaacagtcattttcaccagcataattttatcttaaggaataactaataggaaaagtcagcttaattatttaaggccctagtttctacatataatatattcgatagtaatgaaaatctgccgtggaattaactaataagtagtaacaataaacttcatatttagaatgcaaagtctataaagaataattttacatgatcctcaatatcaactccagtttaaaaagtgttatttttaaaacatttgaaaccaagtactgtttaatttcaatcagaagatgcaaataaatactttgatctatgtttgattttgctaataatatttgaaggagattgcctaccaaggacaaaacaataaatttaaaaatcaaacgatttctccatacgctcatagtcacatatggaattttgagaaaataaagcatgctgtctttaggaatttttatacttctttgtctttcttccttaatatttgcttctagctgctcttggcaatgatgaattgttatgtatgcattaatgttttgcagcccaaaagttgttcacatttttcctatataagatctgtggagtgtgtgtttcaaagagagaactacagaaatgttaaagcaggaaaacctgaatgtgatgtgcacattttcatcccacatggacaatgtatgtgttttaataaatggaattttcagattcaaaaaaaaaaaaaaattc

SEQ ID NO: 560 - DNA, 2807 bp, Human
caggttgggttctgggacaggtgacccggcggcggggcgaggcagctggcggcgtcgcatggagggctctgggggcggtgcgggcgagcgggcgccgctgctgggcgcgcggcgggcggcggcggccgcggcggcggctggggcgttcgcgggccggcgcgcggcgtgcggggccgtgctgctgacggagctgctggagcgcgccgctttctacggcatcacgtccaacctggtgctattcctgaacggggcgccgttctgctgggagggcgcgcaggccagcgaggcgctgctgctcttcatgggcctcacctacctgggctcgccgttcggaggctggctggccgacgcgcggctgggccgggcgcgcgccatcctgctgagcctggcgctctacctgctgggcatgctggccttcccgctgctggccgcgcccgccacgcgagccgcgctctgcggttccgcgcgcctgctcaactgcacggcgcctggtcccgacgccgccgcccgctgctgctcaccggccaccttcgcggggctggtgctggtgggcctgggcgtggccaccgtcaaggccaacatcacgcccttcggcgccgaccaggttaaagatcgaggtccggaagccactaggagattttttaattggttttattggagcattaacctgggagcgatcctgtcgttaggtggcattgcctatattcagcagaacgtcagctttgtcactggttatgcgatccccactgtctgcgtcggccttgcttttgtggtcttcctctgtggccagagcgttttcatcaccaagcctcctgatggcagtgccttcaccgacatgttcaagatactgacgtattcctgctgttcccagaagcgaagtggagagcgccagagtaatggtgaaggcattggagtctttcagcaatcttctaaacaaagtctgtttgattcatgtaagatgtctcatggtgggccatttacagaagagaaagtggaagatgtgaaagctctggtcaagattgtccctgttttcttggctttgataccttactggacagtgtatttccaaatgcagacaacatatgttttacagagtcttcatttgaggattccagaaatttcaaatattacaaccactcctcacacgctccctgcagcctggctgaccatgtttgatgctgtgctcatcctcctgctcatccctctgaaggacaaactggtcgatcccattttgagaagacatggcctgctcccatcctccctgaagaggatcgccgtgggcatgttctttgtcatgtgctcggcctttgctgcaggaattttggagagtaaaaggctgaaccttgttaaagagaaaaccattaatcagaccatcggcaacgtcgtctaccatgctgccgatctgtcgctgtggtggcaggtgccgcagtacttgctgattgggatcagcgagatctttgcaagtatcgcaggcctggaatttgcatactcagctgcccccaagtccatgcagagtgccataatgggcttgttctttttcttctctggcgtcgggtcgttcgtgggttctggactgctggcactggtgtctatcaaagccatcggatggatgagcagtcacacagactttggtaatattaacggctgctatttgaactattacttttttcttctggctgctattcaaggagctaccctcctgcttttcctcattatttctgtgaaatatgaccatcatcgagaccatcagcgatcaagagccaatggcgtgcccaccagcaggagggcctgaccttcctgaggccatgtgcggtttctgaggctgacatgtcagtaactgactggggtgcactgagaacaggcaagactttaaattcccataaaatgtctgacttcactgaaacttgcatgttgcctggattgatttcttctttccctctatccaaaggagcttggtaagtgccttactgcagcgtgtctcctggcacgctgggccctccgggaggagagctgcagatttcgagtatgtcgcttgtcattcaaggtctctgtgaatcctctagctgggttcccttttttacagaaactcacaaatggagattgcaaagtcttggggaactccacgtgttagttggcatcccagtttcttaaacaaatagtatcacctgcttcccatagccatatctcactgtaaaaaaaaaaaattaataaactgttacttatatttaagaaagtgaggattttttttttttaaagataaaagcatggtcagatgctgcaaggattttacataaatgccatatttatggtttccttcctgagaacagtcttgctcttgccatgttctttgatttaggctggtagtaaacacatttcatctgctgcttcaaaaagtacttactttttaaaccatcaacattacttttctttcttaaggcaaggcatgcataagagtcatttgagaccatgtgtcccatctcaagccacagagcaactcacagggtacttcacaccttacctagtcagagtgcttatatatagctttattttggtacgattgagactaaagactgatcatggttgtatgtaaggaaaacattcttttgaacagaaatagtgtaattaaaaataattgaaagtgttaaatgtgaacttgagctgtttgaccagccacatttttgtattgttactgtacgtgtatctggggcttctccgtttgttaatactttttctgtatttgttgctgtatttttggcataactttattataaaaaaaaaaaaaaaaaaaaaaaaaaaaaaaaaaaaaa

SEQ ID NO: 561 - protein, 577 aa, Human
MEGSGGGAGERAPLLGARRAAAAAAAAGAFAGRRAACGAVLLTELLERAAFYGITSNLVLFLNGAPFCWEGAQASEALLLFMGLTYLGSPFGGWLADARLGRARAILLSLALYLLGMLAFPLLAAPATRAALCGSARLLNCTAPGPDAAARCCSPATFAGLVLVGLGVATVKANITPFGADQVKDRGPEATRRFFNWFYWSINLGAILSLGGIAYIQQNVSFVTGYAIPTVCVGLAFVVFLCGQSVFITKPPDGSAFTDMFKILTYSCCSQKRSGERQSNGEGIGVFQQSSKQSLFDSCKMSHGGPFTEEKVEDVKALVKIVPVFLALIPYWTVYFQMQTTYVLQSLHLRIPEISNITTTPHTLPAAWLTMFDAVLILLLIPLKDKLVDPILRRHGLLPSSLKRIAVGMFFVMCSAFAAGILESKRLNLVKEKTINQTIGNVVYHAADLSLWWQVPQYLLIGISEIFASIAGLEFAYSAAPKSMQSAIMGLFFFFSGVGSFVGSGLLALVSIKAIGWMSSHTDFGNINGCYLNYYFFLLAAIQGATLLLFLIISVKYDHHRDHQRSRANGVPTSRRA

SEQ ID NO: 562 - DNA, 1958 bp, Human
ccggaaacagcgcggggtccgctatggcggcggcagccgagggcgtactggcgacccggagtgatgagcccgcccgagacgatgccgccgtggagacagctgaggaagcaaaggagcctgctgaagctgacatcactgagctctgccgggacatgttctccaaaatggccacttacctgactggggaactgacggccaccagtgaagactataagctcctggaaaatatgaataaactcaccagcttgaagtatcttgaaatgaaagatattgctataaacattagtaggaacttaaaggacttaaaccagaaatatgctggactgcagccttatctggatcagatcaatgtcattgaagagcaggtagcagctcttgagcaggcagcttacaagttggatgcatattcaaaaaaactggaagccaagtacaagaagctggagaagcgatgagaaacttatttctatgggacagagtcttttttttttaatgtggaagaatgtcttataaaacctgaatcctgaggctgatgaattgtgaaaattcctcaaaaggaaattatgctggtcatcacaggaacatctcaacgttcgagtaaactggaggactgtggctattcctgaaccttctttgagacagaatccctcagaatctcacacttataacttcctaccttttacttgaatgctttgccatattcaggacagagactctcacaaagttcagaaaacagctggacttaccagtaaaatcaaatgagaggacctattttctctggtagtggttgattactacattattttcttaagtggctggttttttagttactatgtaaatggtcgtttttctgttaatgatgctaatgtgttgtaaacaagattctaaatttaaaaaggaaaacaaaacaaacttgttctttgcagcttatcaccttgtgaatgtcggtaacttacttttccataatattgcaaataacataaaatcttaaaataattccaagctgagtcttctagattgagcagaaatggtgaaaggagtattgataacttggcgtatgtgatgggcccctcttgtttattttctatgtgagtcacattgacatgcgatcagtttgggaaatgtgatgaaaacaaagactagatgggtatgtgtgtttatgtgttgggtagggaggtgacgattgccactcataaaataaaggattttataaaataccttcctactgtgtatgtaggatttggggggatcttagggacctaatcgacttctttgcacactaaaaacatcagacaatgggacatactgactgaccagtctaggttgaaagataggcagccttacccagaacacaacattagcagctgggaaggtgtctgaggtccccaattacatatcccaaagagtttcttacttctgtttctgtcatttcccctctgttccagacagtcatcatttatcctctgttcttcctggactgttgctgtggtctcttctcatcttaactgtcccttccaaccaccctccacactgctgccagagcaatcttaaaaatgtaaactggccctattactcctgcttagaaccctgtagtgacttatcatggcctctgaaaaatctagactttcattatgcatacaagtcccttgtgtttttttgtttgtttatagacagggtctctattgtcacccaggctggagtgtggtggtgtgataatagctcaccttgacctcctaggctcaactgatcttcccacctcagcctcctgaatagctgggactaccagcacgctccaccatgccttgctaattattttttatacagatggagtctcactatgttgtccaggctggtcttgaactggcctcaagtgattctcttaccacagcctgccagagtgctgagattgtaggcatgaaccaccgtgcctaacataaggcccctatttaaacatttttctt

SEQ ID NO: 563 - DNA, 1920 bp, Human
cgcgcgccggaagtacctacctgggataacggcggcgagcggacggctgcatttacggggtctcccggagggccagagtcggaaattgttgaaaacgttaaatttgattcctaaaaggactcaatggcttacagaagagacgaaatgtggtctgagggacgatatgaatatgaaagaattccgagagaacgagcacctcctcgaagtcatcccagtgatggctacaatagactagttaatattgtgccaaagaaaccaccactgctagacagacctggtgaaggaagctacaatagatattacagtcatgttgattaccgagactatgacgagggccgcagtttttctcatgatcgaagaagtggtccacctcacagaggagatgaatctggttatagatggacaagagacgatcattctgcaagcaggcaacctgaatacagggacatgagagatggctttagaagaaaaagtttctactcttcccattatgcgagagagcggtctccttataaaagggacaatacttttttcagagaatcacctgttggccgaaaggattctccacacagcagatctggttccagtgtcagtagcagaagctactctccagaaaggagcaaatcatactctttccatcagtctcaacatagaaagtccgtgcgtcctggtgccttctacaaacggcagaatgaaggaaatcctgaaagagataaagagaggcctgtccagtctttgaaaacatcaagagatacttcaccctcaagtggttcagcagtttcttcatcaaaggtgttagacaaacccagtaggctaactgaaaaggaacttgctgaggctgcaagcaagtgggctgctgaaaagctagagaaatcagatgaaagtaacttgcctgaaatttctgagtatgaggcgggatccacagcaccattgtttactgaccagccagaggaacctgagtcaaacacaacacatgggatagaattatttgaagatagtcagctaaccactcgctctaaagcaatagcatcaaaaaccaaagagattgaacaggtttaccgacaagactgtgaaactttcgggatggtggtgaaaatgctgattgaaaaagatccttcattagaaaagtctatacagtttgcattgaggcagaatttacatgaaataggtgagcggtgtgttgaagaactcaagcatttcattgcagagtatgatacttccactcaagattttggagagcctttttagatttttctgctcaggctaaaaaaaaaaaaaaacagtttctaaaaattttttttcctggattgtgtaaatccttaatatatggaatttttgtgatgcagagaaatactttatgatagttgacaacatttcagtattaaataaacatctaaaatagtctgtttaaaatgtttgattcaaatttttgtattttttgtagagatggggttcaccatgttggccaggctagtctctaactcctggcctcaagtgatctgcctgcctcagcctctcaaagtgttgagattacaggcgtgagccaccgctccctgcccaacacatataccatctgaaaatgttagaattctgagttgtgattttattgacttgttgcttgctttttcttaggctttgtaacttgtaatatgttaaagtgtactatcctaataaactgaatactttggtatcttagagaatatttgctttgagagtaattctcattcaatgataaaatagagcacttaaatctctgagagatacctcagaaaaaaatccgtttttccaagtaatgaactcagtgtcttctattacaataatcctgaaactcctgactctctcactgatgtatgagtcttaaataatatcatatacaagactaataaatagaagatgcagtttgaggtggaaggtgaggga

SEQ ID NO: 564 - DNA, 15059 bp, Human
  unsure 9210: unknown base
  unsure 9211: unknown base
  unsure 9212: unknown base
  unsure 9213: unknown base
  unsure 9214: unknown base
  unsure 9215: unknown base
  unsure 9216: unknown base
  unsure 9217: unknown base
  unsure 9218: unknown base
  unsure 9219: unknown base
  unsure 9220: unknown base
  unsure 9221: unknown base
  unsure 9222: unknown base
  unsure 9223: unknown base
  unsure 9224: unknown base
  unsure 9225: unknown base
  unsure 9226: unknown base
  unsure 9227: unknown base
  unsure 9228: unknown base
cgcccggccccctcccccggcgccggccacgggaggcggtgatgcgggcgcgggcggcctcggctgcgccgagagcggagacacaggctcaagatggcagattccgactgaggctgggggggccgagctcgcgcgccgctttcccgtccccgttgccatgaaccgcggacaccccggccccgatggcccccgtgtacgaaggtatggcctcacatgtgcaagttttctcccctcacacccttcaatcaagtgccttctgtagtgtgaagaaactgaaaatagagccgagttccaactgggacatgactgggtacggctcccacagcaaagtgtatagccagagcaagaacatccccctgtcgcagccagccaccacaaccgtcagcacctccttgccggtcccaaacccaagcctaccttacgagcagaccatcgtcttcccaggaagcaccgggcacatcgtggtcacctcagcaagcagcacttctgtcaccgggcaagtcctcggcggaccacacaacctaatgcgtcgaagcactgtgagcctccttgatacctaccaaaaatgtggactcaagcgtaagagcgaggagatcgagaacacaagcagcgtgcagatcatcgaggagcatccacccatgattcagaataatgcaagcggggccactgtcgccactgccaccacgtctactgccacctccaaaaacagcggctccaacagcgagggcgactatcagctggtgcagcatgaggtgctgtgctccatgaccaacacctacgaggtcttagagttcttgggccgagggacgtttgggcaagtggtcaagtgctggaaacggggcaccaatgagatcgtagccatcaagatcctgaagaaccacccatcctatgcccgacaaggtcagattgaagtgagcatcctggcccggttgagcacggagagtgccgatgactataacttcgtccgggcctacgaatgcttccagcacaagaaccacacgtgcttggtcttcgagatgttggagcagaacctctatgactttctgaagcaaaacaagtttagccccttgcccctcaaatacattcgcccagttctccagcaggtagccacagccctgatgaaactcaaaagcctaggtcttatccacgctgacctcaaaccagaaaacatcatgctggtggatccatctagacaaccatacagagtcaaggtcatcgactttggttcagccagccacgtctccaaggctgtgtgctccacctacttgcagtccagatattacagggcccctgagatcatccttggtttaccattttgtgaggcaattgacatgtggtccctgggctgtgttattgcagaattgttcctgggttggccgttatatccaggagcttcggagtatgatcagattcggtatatttcacaaacacagggtttgcctgctgaatatttattaagcgccgggacaaagacaactaggtttttcaaccgtgacacggactcaccatatcctttgtggagactgaagacaccagatgaccatgaagcagagacagggattaagtcaaaagaagcaagaaagtacattttcaactgtttagatgatatggcccaggtgaacatgacgacagatttggaagggagcgacatgttggtagaaaaggctgaccggcgggagttcattgacctgttgaagaagatgctgaccattgatgctgacaagagaatcactccaatcgaaaccctgaaccatccctttgtcaccatgacacacttactcgattttccccacagcacacacgtcaaatcatgtttccagaacatggagatctgcaagcgtcgggtgaatatgtatgacacggtgaaccagagcaaaacccctttcatcacgcacgtggcccccagcacgtccaccaacctgaccatgacctttaacaaccagctgaccactgtccacaaccagccctcagcggcatccatggctgcagtggcccagcggagcatgcccctgcagacaggaacagcccagatttgtgcccggcctgacccgttccagcaagctctcatcgtgtgtccccccggcttccaaggcttgcaggcctctccctctaagcacgctggctactcggtgcgaatggaaaatgcagttcccatcgtcactcaagccccaggagctcagcctcttcagatccaaccaggtctgcttgcccagcaggcttggccaagtgggacccagcagatcctgcttcccccagcatggcagcaactgactggagtggccacccacacatcagtgcagcatgccaccgtgattcccgagaccatggcaggcacccagcagctggcggactggagaaatacgcatgctcacggaagccattataatcccatcatgcagcagcctgcactattgaccggtcatgtgacccttccagcagcacagcccttaaatgtgggtgtggcccacgtgatgcggcagcagccaaccagcaccacctcctcccggaagagtaagcagcaccagtcatctgtgagaaatgtctccacctgtgaggtgtcctcctctcaggccatcagctccccacagcgatccaagcgtgtcaaggagaacacacctccccgctgtgccatggtgcacagtagcccggcctgcagcacctcggtcacctgtgggtggggcgacgtggcctccagcaccacccgggaacggcagcggcagacaattgtcattcccgacactcccagccccacggtcagcgtcatcaccatcagcagtgacacggacgaggaggaggaacagaaacacgcccccaccagcactgtctccaagcaaagaaaaaacgtcatcagctgtgtcacagtccacgactccccctactccgactcctccagcaacaccagcccctactccgtgcagcagcgtgctgggcacaacaatgccaatgcctttgacaccaaggggagcctggagaatcactgcacggggaacccccgaaccatcatcgtgccacccctgaaaacccaggccagcgaagtattggtggagtgtgatagcctggtgccagtcaacaccagtcaccactcgtcctcctacaagtccaagtcctccagcaacgtgacctccaccagcggtcactcttcagggagctcatctggagccatcacctaccggcagcagcggccgggcccccacttccagcagcagcagccactcaatctcagccaggctcagcagcacatcaccacggaccgcactgggagccaccgaaggcagcaggcctacatcactcccaccatggcccaggctccgtactccttcccgcacaacagccccagccacggcactgtgcacccgcatctggctgcagccgctgccgctgcccacctccccacccagccccacctctacacctacactgcgccggcggccctgggctccaccggcaccgtggcccacctggtggcctcgcaaggctctgcgcgccacaccgtgcagcacactgcctacccagccagcatcgtccaccaggtccccgtgagcatgggcccccgggtcctgccctcgcccaccatccacccgagtcagtatccagcccaatttgcccaccagacctacatcagcgcctcgccagcctccaccgtctacactggatacccactgagccccgccaaggtcaaccagtacccttacatataaacactggaggggagggtgggagggagggagggagagaatggcccgagggaggagggagagaaggagggaggcgctcctgggaccgtgggcgctggccttttatactgaagatgccgcacacaaacaatgcaaacggggcaggtgcggggggggggggggcagagggcagggggacggggtcgggacaccagtgaaacttgaaccgggaagtgggaggacgtagagcagagaagagaacatttttaaaaggaagggattaaagagggtgggaaatctatggtttttatttaaaaaaggaaaagggaaaaaaaaaaaggtcaataacaaaaaacccagctcaagaacccattctacgccaaactggaaaggagaagagagcaacaggaagattccagaaacggggggccccagtttttgaagaactttatgaacttttcaaagattattttcatatggcagcaagtgatacggaagactgctgtcagggacacctgatatggaaatcaaatagatttttaattaattgaacataagatttagggatttttccagaactcgaaagggtcaacagccctccagaatgtcgggctgcagcctgaggaggctgatgtttggagctggtgtgggattggcgaagcccagtccgggctccctagtcaggaaagacgggggacggccaggctgctggaaggcccccgggggcgcggggcgagttttctttttctgagcactctggataaatccctaagcaacgttgtttctcaaatgtcattaataatgtgtgttgcaaactttaggtttttttcttttctgaaaatgtattttctctttgaatccacccctagtcgcgtagcgtagggctagcggtcgtcacagacaccctagtagaatgtagcactcagcacccttgtctcctaccttgtgttcaactccaatgataccaatagaatattcctcaatgtaattgcacaaaaaaaagcgatataacataggcatgtaaccaatgtggcggtgcaggtgtgcgggtgagcgagcacgtgtgggtgtgcacgcgccgccctccccgcgtggccctcggcgccgccaccctagctggcgcagtcttgacactgcatccttccctcctagtgccttaccgagcgacagacgcggcgtgagggtttacttccactggtactccaagaaactgaggctagtcagacacaatctcagctcttctgttgtgctgttgtaacagtttacgctggccttttttttttctttttctttttctttttaaaatgttaatgcccgttgtctttcctgggctgtttgctagcggaaggatgccagggaagccagcaggagctaggagagagtccgtggatctcgaaagaaatatgggagacagatgcccggcgggtgcgtctggagatggggacggcgggagttgagttgtggcagtagttgagttgtaatttgtgggcggaggcccagagagactccccacccttcacccctgccccactctgtccccagttccgccatttgtgaggccagaggtttccggactgttggcctcgccaggcagccgtctcccgccccaggcggcatcccccagtccctcccgcctccacgagagcctggagctctcagcctcgcccggggctccactctctcctccggctccctgggctgttttgctctaacgatcttgccagatccctccctctgtagacaaccaccaacctctgtttgctgttgaattctctcctcacattacccaggtctgctcaagacatgattttggttttggtttctgagggttctagtgggcagaaggttggagggacacttatgagggtggccgggggtctgacgctgcactttggaaaaactcacacagttgaatttccaaagaaatctgccctttgccctctttgcacctttgatacattctggaagttttctcaggctttggacacttctggggatggaggtgtggagaagtggggagttccctctcttcatagtaaataactctgaaatatgtgaatgtgaatggcaggagaatctggccaaggatggggccgaaaagggtggttctaattgtttgcttctgatgttgagtctttagctgaccccacaggcaggtttccaaggtgcaaagagatctttcccgagtcagcggccccatcctcatcctccctccctttacttcctcactgtgcagtctccctcaaggatctactgtgaaaggtgtgtttgtagtgatatccaacctaactcagtaacgaagtcgttacttagctcttagctgtgaaataactctggaaacttccccaccccaaccataaattcttacttataaagaaacaggtccccaaactggaaacagcttagtccaggcctcagcgagaaggaaggacaccatgactgctccatgctgggcacagccgggcagtcttgccaagtgcctgctggaggctgtgccggcaagaggcctgcagcaaggagattcccttccctcgggccattatcaatactgtctttatctggaggtggggaagcgcagccctctgagacagcaggacaatggtcagttcagagagggtgagggcagcaaacgcttcagaggacacagaagccagaggacccccccccgccccacagctgggtcagcctggaaaatccatctattagggactttttggcagccagatggcagcaatagcccattaggtctcatcccgagttccaagtcttggctgcaaatgagcctcagttcgccttactggagagcacccccagattcctgggcacagttcatttccagccctttctagatctgatcttttagggggaaagacagcttaaaatgttcttttcattttaaagaaaattattctgtctgcttaagttggaggctacttactctttcacctgacattttctttccttttattcttccagatcaggaatgaaatttccatgctgctcataaagataatattattgtactaattatttttattaccattgtaattatgatcattatgttgatattttagtcagggttttaaatgcacatttattccaagtatctttgtgttttctctttaatatttaaacttattctctctgtgagtatataagtagactggagggacatccagatgtccagttttgtcaggccaaaaaaaaaaggaaagacttaggaagtaggaaaattgtttctgtcatctctatcccaacaagagacgtcaagaaagatccaccacagaacaaaagtttaaagaagaatcaaagccttgattgggcttctgacaacatggtcaccatcaaggttgtcattttctagatcccagaggcctgggatgcgacgtcaggtggcatctcatgggctcggggaatgtcgagtcactgactgtccagcccttagccagcttctctcccacatcctcagagctctcctgtgcttctgaaatctgttaactaaatctttggcttgcctctggtatttaagcaagaaaattccctcccagaggtgaccccatccgcttccccacaatccatccttttgccatcggcgcacctggggcgtggcttaggttcttcaatgcagggacatttgccccctcccagaagctgctgggcacagtgaggtggcgtaagagtgactggcaggtggtaccttccccaggaaatttcaccacaccacccagttcctcagcctgccccctccccctgtgatgcatgcccccagcacccaattctagccagctggaagtgggtggagggacagcaggaggccagagaaaccctgaacaaagctgggcggctgctcaggcatcacaggctgcaccccctctgaaagcatccccactgggctccggccacatcttcagtgcactgtgctgtgtgcgctgggtgctcacacgctgtccccagacccacaaagtgctaggccccagttgaagaaaggggtgaaatagccagcttcaccgaagggaagggaagggaagtattgggcgatgccagccccacagacgctcagcaaacattagtgcacattctcctagtcctcacccaatggcctcctctacccccatgcatggagctgccacatcagaagccccaagagaagctccctgcaggagaggccagctccctggatgcccaattgcatacctggccgaatctgccattgagtcaccttagcaaataggctgctgtcactaggaccaagctctcaagcagagggatgccaacctagtccttacttagcccacgaatcatctagagcatcctctagtcttttgtgggctccctccttcccatttgaagagacattgttcagaggaagaggggaagatttgaaatgtcaggtcacggaggagtgtttaactggagcctggtgaaccgcagggcaatttgcttctgctcactgggttctgactggcccgtctggacgtgggcccccatgtctctgtgcttagggcctcttcatgatgttttggatgtttccaagggaagtgggtgagcagatcaaggggtgggagagtcgaggcttgattccagttaatactgtgaagtggagcgtgcggtcagtggaattcagaggaaaaagaagggttggagcaaagcggcattcatctcctggactgttagcctttctagtcttcctggtggctgaggtgttcacgggctgggggagccagctgacctttgtcctcttcaacctagaagactcagcccgcccagacaccaacgtgtgagacggatggacatcaggaagggaaggggagattagcccaactgctgacagaacgatttcccttggttggaccttgggaatggcaaacactcatattggaacaagcttggggtggaagatttaggccgtgtgagcgtgtgtgagtgagtggaacaaactttcttggaaactggagggaggagatgaggaggcttcgggaagtattactgatggctcatggttgagagagcgacgtggggacccagctcgccccagcttttgtcccaggttctctttgtctgatgctgagggcagggtggggtgtgggaccaccactcttgttggcctgtcaagtagaccctaggacagaaaatggaaagaaggaaatggctcggtgctctcaactagcagagagaattgaggagaggtaagggttccttctgcaggccagcctgggactccacagcgccagcaggagtgacttggccacaagacattccagccccagggactttgcaggcttcattccctgtctgtgtcttttccttctggtgtgttttacagacttctgatggggaagcttcaaacttgagcaggccagagatgtccttaccaaattggaaaggaaggtgaaactgttcctttctttagccaaagaacccttctcaaagacgcctccagaaatggacaaaatggccttcccttcgttcctttccaggcaataatgacatcattagtgatgcaattctatttgtctttctctttcctctctgtccnnnnnnnnnnnnnnnnnnntgcatttatttcaaaactgtgctattcttttaagaggagtggaggtgaccccttcgatgctgctgctatcgggagacaaggtgccataccaatacgtgggcttgactaatcccaggccaccatgggagagagcaaagcagggctgccaggagttcagttgcatcaagggcgtagagcacgcgggggctgggctcggaatagcagtacttttccactttgatgccttagaactctcacttctcatctccacagaccagactcagtaaaatctcaggccactagagaatggaaggcggtgaaacaggatttaaatgcaaaaaaaacctattggaggcttttggcaccgtggctcactagagggacccagcatagtagaggtttctcttgttgcagcttctgaaaagttcaaaaaagaactccaggccgttcttccctcaaacccagtgagagtttgcagagaagtgccccctgcagggctcccgtcccagaacaccagcaccagagagggtcttcccgatgccccccgctggacttgcccaagcctctgggagcccctcatctcagatccctgtgttgaacatgacactgactgtcccttatttgttaaaatttgcaatatctctcaagtaaataatagccaacatttgttgaatgctttcatgactcccgggctaaggcctttatgagcgttgtctcaaggggccccaacagccatcccacagggagggggataacagcccccatttatagataagggagctgaccggatgctctgagaagtggcaggtgttgaaggaaggataaagcagtgatgggccagaatccccaaggttcccttttttgttcatcaggcccttcctgagatgtgatttttaatcttttaactttttttaattaatagcaatgcgtggcctcatatttctatgaaccatttagtgatactcccgcttcctgcatgccacacactgtgctgggaattgctcatgggttgtcctgtttcatcttctccgtagccctgtgagatcggcaatattagtccccctacagccaaggaaactgcccagagccacacaactcttgaggggcgaggagggcttgaacctgagtctgcccagctccagaactgagcttgcagccattagccacagctgtctcctgcatgtctgagcaaagaaaggcctttacacagcatcaccctgtgccatcccatgcaccgtgggactcagctaaaggactgtgcaaagagggggctcctgagttggatttaggcaaaaggggcagaattcgtttgatttttagagaaaatctctggagagtttcttttgattcatagaattccttttagatttctttccagcataccaactagctttagtagtgctgctacaaccagctcttataagtaagagtgaaaaagtattcttttcttctttaaaaaataagtttttcttgcttatagttaattctagaaaggcaatactaaaggtatatatttttttcaaaatgctattttttactgcacttgataattatcctgacagctctgatctctgtaatagattcactcttcagctctgggcagaaccagaggcagggttcacaccaaatttgtaaataccatatgtgggtctggtgtccaggaacttttttctttctgttaaaaaaaagaacaaaaaaagaacaaaaaaaaagaagtagaggtggaagaaagacaagacttagaggaacaaaagaatgttttcttttgagatactcttctcaaagaaatagcaacaattgtataaacaggaaaaccagccagctttcatgataaaaggaaggcgtgtctcttgccctggtatgagattaacagaaatacagatgcatttttattttgattgaaagatggtgagaatgtagaaatgcttaggactagatttttaattttttaaaataactattatcatttattatgaaatatttgttcagttgttttgagtgggtttcttgtcccttttttcatttaaaaccttctttgttgactggctccaggcttgtttgcctaaattcttaggtagtttacacaagttctagaatcttttagaactttaactccattggaagcaaacctaactaatcggagtttgagatcctggttggtttcaataggtattctggaattctggcagaacacctaaagattttttttttttttagaaggttttagatacattatcttacacaaactgtgacctaatggcaataattacctcaaatgtgggcattcatcctggttttagccttttttgaaatcatgtagccagcttgatcttggaatttaaagactatgaattctctgtgggctgaaaataatgattacttcatacccccggtcatcgttgcttaagtgaattctgaaaatagctcatctttacaacaaaaattaaaccaaggaagagattattctttgtgtgttgtactcaaatgcgatgttcaaatgcacatgttaagtatatatgtttttagctactgtaaaatgctgttagccttctaagctatcaaaacagtcacattttaaatgagtaaactaaacaattgactgtggatacttaagcatatttctggctacgttttatagttaaagtgttttatagtttacatttagactggtactttttaaagaaaagttctgtttataactgacatccgcaaaccccagtgaatgcctcttagttggaggttgtgtctcccccaaggcaagtgtgttgtcccagactcttctgtagtccagcatgcgcacttccctctggattattactttccacgtgaactcaagagaacatgaaaggcaatccagatggagggaaaaggtgtgagtccgcagcccgggccagatgcgaaggtctcatgcgtgtcgtctaaacacttgtcttcaaggccttctctctgacatcttggaagagtcattgagaacagataacctggttcattgatttttgtcttgatttgaatatttaacttattaatagatccactgatttccaggcaccaggcagtagaagagactgggattcaggtgaccatgaaggcacagctgctacttctgggccgggggtgatattttgatcagcgttttgtaggggaggaccatatacccctattcccatggtcgctggctgggttttccatatatctgctgtcatttattcgttttccccttaaaagcaaaatcaatgtaaaaggctatgtttacgttttactcattgtccagcttagactcaaagtctagttcggtgggagggggaccttagcatcctctcagagatggtcagggctgagcaggaggaggcagagacagaggggcagctcagcctggtccattgagacccactctaaacagacatcatatttggaacaagaagatgcttcgagacaggaatgggccccactgtcatgcagaaacagactgggggaatggcagtttccctgagtcttggtttcttttatgttttctcttgtgccaccaccaaactgcagaggacctgctgtgacctaaagggcattcctttagcagataagaccttgaaaactgcaaaacacctgggaccagggagcttttaaaaaatacaaaaaaataccacatttgctttttccctgtgaactgtattgacagcgtgttcttaggacagtcttttggtggaaatgttactgtaaaatagttttcatctcacccctcctaatcatactcccactttcctgtttgtgtggtggtgttgctgttttttcctttacatgaattaaccaaatgaattttgtgtcattgtttttggggcttatatttttaaaacatagaaattgccttttgttcatttgaaaagtaagtatgttgtatctgaaaaagggctctgcctctgctctccctcgcttccttgtaaccaatctccaaacgaatctctcctggcaccgcccccttccttatatagggtcactgtccccggggccacctctgcctccaccctgctgtcaccactgccctgggccaaggcacccaggactcccagaaagcgcgagagccagcaagaaggccccactcagccttgagactggtggtcacacctccctgtcagagtcgcctgctgggctgaaggggcaatggattgtcattgttgaaattgtttggctcaggttataaggaggaacttgggaagtagaaagtgacttgaccatgtgcatccttggtagcttcctgtaactaacaaatggaacagagagcacacccccgccccgccccaccccaagcagatgttcccgtcagcgctgccctgagtcagtcggtcccccgtttctgctctcctcccttttgtgttcctgctcacttcaagcttcttccatggactttccagggcacagtcatctctagcccccaaatcatctcttcatcctctgtgtgtgcatttttttaaccaaatgaaatagacaagaaagtcatactttggggcagcagaatttctaatttagtagaatcactgtatagagatagatgttgatatatatgtttgtgtatatatatcaaaccaaattggataggagaagtatagctttacagatgaggagaaggagctctttagaggtcggagtcaagactggtgtcttggacgtgcatgggctgtgtcccaggccactccgcacacatggggctgaggcgtggcgccgggcccttgtcatccacctcaccacggcagagccagcaggccctgtagggtgctgctgctgtctcactgggtcccagcttcaagcgcatcagtgggtgacgggggcaacaaatcagagtgactggaagtttccatcccgttttgctttgaccacgtgtactgagctgcagcctctgatactctgtcacgtttccaaaaatggtatccattaggatagaaagagaatggatctgcagaaatgtttacctttcaactgctcatgaattcaggacactggatagaaagactcactccccaaaatgagaacagggaagaggagacccggcgacactaagtcaccaggtccaaggaacgtggctccctccccagggtcatctcacctagatctttctctcccaggtcatctcagctcaatctcaataaccctatgaaagccctggtctgttgtgttccttcaccgtacggtttctgtaataaaaagtgttaatccatgttaatctgtgtgaaaattattgcgtgcaacagtattttctcgtgtacctctttttcctatgtgaattgtccctcttttttatttataaatgtctacttttgtttttttaaagacaaaccaatgtgttgtagacctatatgtaacctattccttagtctcatattataggtatgttataagaatggatattttacttggctttagaatgttttacaagaaaactaattcttaactgatcaagtccttgctactaaaatgcttgtgtttttcatcatgacgtcgtgtgcttctaaattaatcattttcgttgtagaaaaatggagtgaatttatattagtcttggaaactaataatagcattgtaaatttatgagatgattttaacagaaaaaatatagaagaatatagttattttaattgtaatattactaactgtagggtgagaaaaaggggggggggtcccattgtggtgaactatgttatagcttgttactcatagtttctttttgatcattttttcggtctccgaggtgaaatgacttattaattaaaatttgtaaactcacatatgcatattgtatatgtgtagaaatgtaatcacactttgtcttggaattacattaaactgtttgaaatcactgtaaaaaa

SEQ ID NO: 565 - protein, 1171 aa, Human
MAPVYEGMASHVQVFSPHTLQSSAFCSVKKLKIEPSSNWDMTGYGSHSKVYSQSKNIPLSQPATTTVSTSLPVPNPSLPYEQTIVFPGSTGHIVVTSASSTSVTGQVLGGPHNLMRRSTVSLLDTYQKCGLKRKSEEIENTSSVQIIEEHPPMIQNNASGATVATATTSTATSKNSGSNSEGDYQLVQHEVLCSMTNTYEVLEFLGRGTFGQVVKCWKRGTNEIVAIKILKNHPSYARQGQIEVSILARLSTESADDYNFVRAYECFQHKNHTCLVFEMLEQNLYDFLKQNKFSPLPLKYIRPVLQQVATALMKLKSLGLIHADLKPENIMLVDPSRQPYRVKVIDFGSASHVSKAVCSTYLQSRYYRAPEIILGLPFCEAIDMWSLGCVIAELFLGWPLYPGASEYDQIRYISQTQGLPAEYLLSAGTKTTRFFNRDTDSPYPLWRLKTPDDHEAETGIKSKEARKYIFNCLDDMAQVNMTTDLEGSDMLVEKADRREFIDLLKKMLTIDADKRITPIETLNHPFVTMTHLLDFPHSTHVKSCFQNMEICKRRVNMYDTVNQSKTPFITHVAPSTSTNLTMTFNNQLTTVHNQPSAASMAAVAQRSMPLQTGTAQICARPDPFQQALIVCPPGFQGLQASPSKHAGYSVRMENAVPIVTQAPGAQPLQIQPGLLAQQAWPSGTQQILLPPAWQQLTGVATHTSVQHATVIPETMAGTQQLADWRNTHAHGSHYNPIMQQPALLTGHVTLPAAQPLNVGVAHVMRQQPTSTTSSRKSKQHQSSVRNVSTCEVSSSQAISSPQRSKRVKENTPPRCAMVHSSPACSTSVTCGWGDVASSTTRERQRQTIVIPDTPSPTVSVITISSDTDEEEEQKHAPTSTVSKQRKNVISCVTVHDSPYSDSSSNTSPYSVQQRAGHNNANAFDTKGSLENHCTGNPRTIIVPPLKTQASEVLVECDSLVPVNTSHHSSSYKSKSSSNVTSTSGHSSGSSSGAITYRQQRPGPHFQQQQPLNLSQAQQHITTDRTGSHRRQQAYITPTMAQAPYSFPHNSPSHGTVHPHLAAAAAAAHLPTQPHLYTYTAPAALGSTGTVAHLVASQGSARHTVQHTAYPASIVHQVPVSMGPRVLPSPTIHPSQYPAQFAHQTYISASPASTVYTGYPLSPAKVNQYPYI

SEQ ID NO: 566 - DNA, 3642 bp, Human
gcgcccggcccatacttcgtattcttaaaaaaaactacactcagcccagcacattgatcaagtatctatctctgagcagttggccttgccagggagagcagagatgtggcaggctccttcagctggagacagggagcttctcagagaagtgagcagagactccacagacaccctaaaaaggcttctactcaagaagtaaagccactactcctgcctttttgcttagtggacaggaaggcacaggagtttgtctgggacatcatagaaattcttaggtttaacttaattctggtcattgtcttctttatttcctgtttttcttccctttgtcagtcttcgcatccaagatttcttccctccctcttgtgggccagcctgtcctgttccagagctagcctgttcctgggtagccttccttagcctccattcagcctcaggtcttttgccttcttccgtgtttatttagagagcagaatctaataacgggttccactgtagccactatccatggacttctgggtcctcttcaggtttgagtgcttgaaaatgttcattctctgggcttgtggcctgtctcctccactctcctcctcaccctctcgctccttcctgtgtgagggccgctctgcagtaatgttctcaggcaagccttcctaggcacctcagaaactactttgccagagccagtaagaatatataatattggagcagttgccaggatagaaattaaatatagattccagtttaggatagagtttttaccgagagctctttagacagtatacctgtgtcttctctggcaattgctttcattttagtcctatataaaagctttccttttctgtttttttttaaaactatgcttttgcttgcctaaatcttttgatcttatatttctctcatctcagagcctgtcctgagttgtaaggtatttcatactgccttacttaaaagttttttaaactactagagtcatttgatacacacagaagttacctaataatccaaagatgtccatcaagggaggaagggtgggtcatcagactttgcctttgatgttgtagactaggctcctgagttaagcagcagagggacagcagtgccatgtgccttcactgtgtcccaggaaatctgggttggttccagtgggaaataccagtatttcttggttctggaaagtagcaaaagagtaggagatggggaaatagggatggggagagcaagccccgcatgtccatggcgagtcaggtggggagcacgggtggaagggccggctgttgacagacagactaagctgtgtggtgctcttgccgccccttcctgggtacagagcttgagaaaaatgcagccgaccactccctgtgtttgtacagagcaaagcccaaaagccaacctcagatctcctgatttggcagctgaagaaatcagcagagtcctgattgcctgattcagtcccaaaaatgaatgtcaggccccgccccctccccaccaacattgcctctcctacattctccttctgcccctaaatcagacaggaggccagagaggagtattgctcaatgcgtgctatgtgcaactcctcaggccttgtgccacctccatgctgagccctgaagcagggtgtcctgggtgcctgtgtgtcagctccctcctctctacctacctctgaccttcttgtgggtgagggtggccatgcttatggccatcttaaaactggagaggcagagaactacttatgagtctgtagaccacgtgttgtcttccatggcctgtttctcctgctgtctgggtgagtgagcctgcaacgcaatgcccatgagagtaaatgcctcctgacctaccctgctcagcactgttctagtgtcttggccttgaaagaaaagcctgacttcctgctgacacatgtggtaggggcatggcagctatgaggcacctcctacgtctgttttctggctgtggtgacttgggatttttaaccttatatatctttttcctttactcaaaacaaaacaatttttagcacactgaaaaaaaaaaaaagccaaatgttttgtgcctttctaaggcagcactgtatcccaggctgcattttaggacttaatatggaaataccagagtctgagctcctctaccttgagtttcattagtccttagtgtctaggagacaggaaagaatgctctctgtgactggagaggtgacatgcaggtgcagtgtgtctggagtccctttcccctgctgtgagacttcagtggaggagagaagcattgtaccctgggatcatttggttggttccaatcacaagcttagttatcaggttgcatgccttgtctcctgcaaaagacagaatgtttcacaattcccaggtaaactctggaccattccaagtgtcctagccttctgatgacattaattacctagttgtgtcgaggagtataggatggactctcctgagaaggggaggttggtggctttgtcttttctttttgctggatcctgaactggtctagacctcctgcccccaccccccagcccccatcagatgtggctggcctttcatttgaaggcttcagacttaaagcattaagcagctagtgccctctgcagggcctggtttccccagggaagggcagcaaggaacatgggaccagaagcctgtcctcagtaatgtgactatagtgagctttagcaaaagtttttctatataatgacatcttacttatcttttaccctttcctcagttttcccctgcctttaactaataaagaattgggagacagaaattttaaagtcctccttattcaagattttgaaattcttagcctgggagtgctggagagaacctgatgctttctccagaatgaagagtcccaatttgtatatcagtgttaagaagaaaacaaaacaaacacataggtgagattttcgtggactattttaaaaatgtgtcattaatataaaaaatttatattagcagtatttaatcattctcacctgtaaagaataagaaaaacagaaggtaaatattcttacagagaatagcagagctttaagattcattttcattttaagtccattttattttgccagtgtattaatgtttagaagtctgttttactaatgttatttattaattttttttcatttccatacacagttagttaactaaagagctttttcaagcacccatgtctgtaaaaaaatatttttaaataaagtttcttttgttgtagcagacttgagttcttgctcattcagggggttgggaggcaatactcgagttgccgtaggaccaaatgccaaggcccccttcctcatggcggtgagcctgagctgctgtctggagggcagttccaagtggcaggaaagcataggaaggggacatagctcctgctaacagcctgccaggcccttcgtgctgcgtcatcagggcagttttgctgctgaaaagtagggtgactgtctgctctggtagaacttgagccatttgctcagaagcagaggtaacccctgatctctgctgccaactggaaacggttttgtgtgccttttggttgtagtttcacaggcccccaggttcctgtggtacccatgatgaataaaaagcaatgtatgatttctgggacaattaagctttatttatc

SEQ ID NO: 567 - protein, 49 aa, Human
ARPILRILKKNYTQPSTLIKYLSLSSWPCQGEQRCGRLLQLETGSFSEK

SEQ ID NO: 568 - DNA, 4071 bp, Human
tgggggagccggtgccccatcgggtaccgcacggctgccgcggcggccttaccctgccgcgagcgcctgtgacagcggcgccgctgtgctcgcgaccccggctccgggcctctgccgacctcaggggcaggaaagagtcgcccggcgggatgggcggcgaggctgggtgcgcggcggccgtgggtgccgagggccgcgtgaagagcctgggtctggtgttcgaggacgagcgcaagggctgctattccagcggcgagacagtggccgggcacgtgctgctggaggcgtccgagccggtggccctgcgcgcgctgcgcctggaggcccaggggcgcgccaccgccgcctggggcccgagcacctgcccccgcgcctcggccagcgccgcggccctggctgtcttctcggaggtggagtacctgaacgtgcgcctcagcctgcgggagcccccggccggtgaaggcatcattttattacagcctggaaaacatgaatttccatttcgctttcaacttccatctgaacctttggtcacctcgtttactgggaaatatggaagcattcagtactgtgtgcgggcagtgttggaacgacccaaggtacctgatcagagtgtaaagcgggaactccaggttgttagtcatgtcgatgtcaacacaccagcattattaacccctgtattgaaaactcaagagaaaatggttggctgttggtttttcacttctggtccagtctcgctgagtgccaaaattgaaagaaagggatactgtaatggagaagctattccaatctatgcagaaatagaaaattgttcctctcgtctgattgttccaaaggctgctattttccaaacgcagacatatttggctagtggaaaaacaaagaccattcgacacatggtcgccaatgtgcgaggaaaccacatcgcttctgggagcacagacacatggaatgggaaaacgctaaaaatcccacctgttactccatccatcctggattgctgcattatcagagtggactattccttagctgtatacattcacattcctggtgctaaaaaattgatgctcgaactgccattagtgatcggtacaattccatataatggttttggcagcagaaactccagcattgccagccagttcagtatggatatgagctggttgacactgaccctgccagagcagtctgaagcaccaccaaattatgcagatgtggtaccagaggaagaattctctagacacattcctccttaccctcaaccccctaactgtgagggagaagtgtgctgtcctgtgtttgcctgtatacaagaattccggtttcaacccccacctctttattcagaggttgacccacatcctagcgacgtagaagagagccagcctgtttccttcattctctgaacgtatttcagaaatcactgtgttcatcatcaaattagaatgttggttcttttccttctgcctttttgggagagagacaggaaagattcacttgaaaacataaatgaacgtcaagactgaaggcaatagaaattaaagaatgtgagaaagttctggtgggccggcaggattgccgcacaagtttatatgatggtcgtatatatatccctgttaaaaactgggatgaagatgtgcaaagtcacagaatgtaatggaagtcctgatggttacagagtaagtgaaagggtgcctgcgctgacgtgagagaaaggaatctgtaaacagtggaaacactgtgggagtttcccatggtgttttgaagagtggaacgaaggcgatatgaactgaaggggtgaagacttgattttggagagggcaacaaaacaagggtgtgtgtgcataggagaatggcccactccaaatacgaagtgagatcctgagtctttgggtgcttcatgatttcctaccatattcaggcctaaagacattgaaaaagcatcttttcttgagatcatggtcatatgaggtcctaatgaagtactacagttttcattctttcaagggtagactaaaatatagtttataaatcggcagtacagtattatgaaaccaagaaagggtttcttgaaaagcttgtcggttcaaagaggaaagatgaatttcaatgtgaaaacacgttttgttgagggctgtactttttaccccctttaagtgctttaacaggatatacgtttgattttcctcatatcttatttacctaggagcatgtcagagaaagaagggagagaaaaggttgcatctgcaggatgccttgataactacacagtcccaaataaaaggcctttttctaacctacctctaatggggttatcagatatgtttttaaatctctcgccctgagtactcttcttgggagttgctgctgtttacagccacagtctcatctatcactaaatatgaaactgggccaaggggaaaattcagtaagttagcgttaaatggaagtaaatatatgtatacctaagagaatgtcaaaataaacaccaaaccaaaagaaggtaggagtgccatttttagaaaagacacaactttaattcctgtcaagagacctaggtctactgatggcagtcactgcattgtacattattccagttcttcagtaattctgtttaaactgtgattttctttattgtgttggtgcaatattttattatcatttaacctcaggatattcagaccaacaggattgtgttgctgctgaaagtctgagcagtgttttaccgtccccagcccccctcccacatggtcacatgttcacttgcttttccttccatctgttggttttgtgagctgagagcatctctggacacatggaagggagccagggattcctgtgatacagattttgaaccagcagagtactttggttttcttcatgtcctaagggtttgatccagaaaccctggtgcttcccctgcagaatactgtacttcatttaacagaatgattgatttttctttcaatcagcatgttcaccaaaaatagaaaagttcttctaaggttaaattttgtatttaaaagttagttggccatttgatcagggaattttctacacacattaggcaaatgtatgcttttcatcctctgggcttacctctctcctctgcaatcctggaagcattgtgcatagttctttcattgtaagccgctatttaaattcccacaatgcaaaactgttagaccagtaattgtgctactgaaattgtcacaaaacgttattccttgatttggtttttaaattttgcttttgtgtgtgtgtctttaaacaggtaatgtgtatttaagtgttgtctaaacagttgatttttactttagaaaagatcatcttcaactgtttattgacttctgagttatatagttcatgccctgccaaggcattgttcgactccatgatactaaaacataatgaaagaaacaaactccagtatggagaagagaaagtttaattatttggttccatctagaaaagcaacaacttaaaggaatccttcactaggattgtcttatcacctttattagataaatcatgtagtgtccctgtgaaattgaagtgaaactatctctgtaggacttaagagaatagctaaaaggtgtgacttgccttattgaactgatactggcatatctgactgtaagcagtaggttgaagatatcattttatgaatgtggagaattctacattgaaacagaaaatacctgggaatgaagattaaaaatgtagctgctgttatttgcttggtgattcccctcttgctcttctttagtttgaaaaaacaaaaacgtggccttggaattttcattttgatgcagaaattttgaaattgaaaatgtgcatgttttggtgcacaaaatccttctgtgggcaaaactttgtttttgttttgcacagtaagaaacaataggcaagcgttatgtttttggtaagttaactatgaaagctttcttatttttattattaaaaatgtaacaatttaacccacaggaaaaaaaattactttgtatgcttgtttgaaccctatgggttcgttttattaataaaattattacacaaaaaaaaaaaaaaaaa

SEQ ID NO: 569 - DNA, 819 bp, Human
  unsure 131: unknown base
  unsure 135: unknown base
  unsure 136: unknown base
  unsure 138: unknown base
agaatgagacccccgtctcaaaaaaaaagaagaagtagataatctgaatagccctatatctatagaaacttaatagtgctgggagatataggtattattatcctcattttacagatgttgaaaattgaggntcanncnagtaaagtctattgctcaaggtcatgtggctagaatatggcagagccatgattcagatccaggtcttctgattcttattccagtgtcctttctagcataccatgttgcctctaaagattgcagctccttatttactagaaaattgttcctgcccaatctacatctccacctcaccccatcttttcttaagcactatgtttgtgtttttatcagtattatattcattgtctttggaatacatgttcttgtttgtgtttggaaaaaaaatctcttttaccagcttgcactcggaccaacttggaaaaaaaaaagcttaaatgtttttgctatgtacagtttaaaaatgtgaagtttgtagctttaactttttgtaagaaaatctaataacactggcttaagtgctgacttgaaatgctattttgtaaggtttggatgtaagtaatcaattgaggtcagcagtttgtatgagacatagcttcctccattgcccccactccttttttcttttttaagtttgagatgcttcctgtgtttttatgttagaattgttgttctccttcttttcttcttcctatacctcatcacgtttgttttaaataaactgtcctttggaccacaaacccttattaacgagaacctcaatatatagcctggataatggtgttgtgaacaatctttgtg

SEQ ID NO: 570 - DNA, 4591 bp, Human
  unsure 4562: unknown base
  unsure 4563: unknown base
  unsure 4564: unknown base
  unsure 4565: unknown base
  unsure 4566: unknown base
  unsure 4567: unknown base
  unsure 4568: unknown base
  unsure 4569: unknown base
  unsure 4570: unknown base
  unsure 4571: unknown base
  unsure 4572: unknown base
  unsure 4573: unknown base
  unsure 4574: unknown base
  unsure 4575: unknown base
  unsure 4585: unknown base
gggggggttttgtgtaggaaaaccataattgttgattttaaatacaggtacctgccaccggtaattagcatgtaaagctttgtctatattccttcctccaacttgggttcaatcagaagatacttgttggaatgaactgaagaaacttcccttttgatagattgaactgaaactgcttattgtatgtggttatatttggtaaaagttgcgtgtgagctttttacaaaagggtaagaattgtgttgaattttaattcacttgtataagaaaacaatttaaaactctcataataggtcttaaatatttttacttgctattctccctcagtgatatatacctcttcctttccagctttatgaaacatctatttaagatttaaagttatcagtgatcatagtttggagataaaatttgacccaggaatgaatatttattttaattaggttttcatacttattaaatgtaattaaagacttgggtcttgtctgagttcagtggaattgaaaccacaactttaatttccttacagaaaaacttaatttgtttcttttagtgccacaccttaaaaagaaaccccaaactagctcctcaggaatatagttttattttgcaagcataccatctagctgaaattgtatacacatgaatatatgtagacttttcctgttgggctgaagtgtgtgcttataaatgtgtttagtttttaagctaaacattcagttaacagtctgtgcattgattagcatagggcaggtggtgaggacctggatttttattaaacagtttagtaattataaaagtttcttgtgtttactagtaaagaattttaaaaatctattctaattcaacaagtttttaaaatcaactttgtaatttgaggggaaaatttggggggaagaggtgggtgggccactaagttacctctctttcatttggtggcccttccaggccattgaaaataaagacgttggctccagtttgcacattgggaagaaagcatagaaatttgacttgtatattaaaaataatagaaatgtaatatgtatattaagaatgcataggtctgtattctgtaaggggctctgaagaacaatatggcactgctgtgttcagtgtgaattcactgcctgggagaactgcaggaatgcttgtcttcaccattgtgttcttacaacgaattcaactttccatggtttatcttgacaaaatttacatgtgtttaggttacttgtatattgatatatttttttaatcttcagtttttgtcttccttttgcctttgtgttttcagaagtaacacatgaacactttttaaagtacattacagagaagaaaactgtgagctattatatagtgtttcttttttaacacaaatcttttaactttaaaaaaaggcaaaaatttttttttctacttcccacccagcttaccaccttgatctctttaacttatgttctaaactttggtgttaatggtggtgtctagcatgctagtagttagattttatttagatgccataactggtaatacagcttttattttgactatattaatttagttttttgaggggaagtttgtttattctgtgactctcaaagcacacagaggttttaaaatatatattattaagactgacgagaagaggaaatgggagggagtaacatcacagaagtgctgttgttcaactgttcttcaatatagttgctagtaggtttgtatttactcagtaaggaagtcagtgacctgaactacctataaaaattcagcagtgctgcagtgttgcttaagtgaaaccctttggctatctagtagtttttatgctactgaaacttggattactgtatgatattcagcttgtcttgggccctctatgtagacaaacattcatattcatagtagtgttgtatactggcctgtttttataactttatttttcaaatattaacaaccactgctttcagagtggttattttgttatttttgaagcaggaaataaccatttgtatttgcacctgcgtattgcatatgaattatggtatacttggcaaatgcttttcttttacctgtgaaaattctgaaagctggtccaagctacattgcataccaaattgtgctcttatatattatttgcatcgtgtcctttttaatcaaatagcatgttttagttttattatagtagcttttgctgtaagaatgtcacttgcttatcttttattgtacttgaattcttaatcatgcttttaacattgtatttaacaaatcatttcgtattaggttccattaaaatgtcattcctttgaaaaggcaagggatttccactttcagaatttgaaaatgaaagtagcatgtttatctaaaggcagaaaatagttcggacttggtattatgaaaataagtaatggtttctggagaggatttgtttagatttgcacagatggcgatggcaccttttacttaaattaacattaatcaacagtgctaaggaaaatttacacaaaattacaagataaaacatggaaatgtgtgcctttcagtatacaaactcttgcttggtggccatttgggtaatcagaccatttgaatgcctgagagcatgtttaatttctgtggagtgccacatatggctaaaacaactctttaatgtgcaattaatttctagagtaaaatgtctgttatgtgagggggatctttatgttgggcttttctattttttaaatgttcacatttctttctgttaattaaaatgccatcataatgtcacatttacactgttgcctcttttaaaagcaaagccactttcttgttctaagattacatcaagacttgagcagtgtgtagtaattaaaatgtgtgcttaatgagcataatagattctggttttaggaaataacatatagcttttatatgaatattttcttttgctataatgaaagtcacagattttttttttcctggcttttatggaggaatgaaaagagttgtctccctctaagagtatactatttttgattctcatagcaataatgtcaccattcttatcagagggtaaataccccttgtataggaaaacagacataatttcctcttgggagttctctttatgacttagcattttcttctacttgagaaaattcctgtttttccgattatttcatcttgaactttcttttttttaagcttttgtgcaatgtaatagtttgttgatccatctttgtacattttcattttatttcatgtctttctctcacctacctgtcagaatcagctatagcagattttgaattctttagttaaaaaatagttgctttacttgtttcctcatgagtttgttaaatagctttgcattttagtcctctattatgctatgaaaattattacgaagtttatattgttccctttttaagcctgccttactcttgtcttttgtcattgtctatggtttaatgaagaacacaccaaactaacatttttgtttattttgaggaacaaaaaaacttttctcttttaagggaagttactacacattgagttagtaactactctttcagtcaaggttccttaatcagtccagtctacatcaggactatgacttggggggcggggctaatcctttttgctgttctgagctactattgtcaactgctgttgtacatactgttatgtgtaatggcgtaaatatatttattatgtttgtaaaattcattgcagatcaaggttgctcttctgtgatatatgggatattatgttttaaagaccatcttggaatacaattagagaacttagtattttgatgtactaagacctattttaagtttaatattctactttgcaaaaactttaattaaagatgttatttaaaaaaaaatgttgcttgctttgcttactagtatatggcattgttatagataattgaataaaatacaatttagaaaggaaaatgctttacattgttaatgagaattccatttaacaacaacaaaaagatgctaaattctgtaccttaaagataagtagattgagatgtcaatttgaattagtaaactgtgttacaaatgattaatactagcttttaaaaagttgtattttccaggcacacaggaatttaggttgggcgaattcacactaacaaattataactaaaaattggtataattaacattgtttttcaaaataaagattactccttgtgaaatattaataattaacatattgtattaaataagtatttctactccaaagtatagattacttaggataaaaacattgttatttctctgtttagtcaaaccacttcctcttagttcagaggttataaataattgcatattaggagaattggattactgaggtttgtattgcgtattgaatatattttgtgttattttagaagataataattagcaggtattttaattttatagttaattcagctgaatcattaagaagctcgcctttttgtatttttttatcctgttaacagactatctagaaaacatgcaaattttaactattaacataatcataataaagatatcttatttattgccagcaaaaaaaaaaannnnnnnnnnnnnnaaaaaaaaangggggg

SEQ ID NO: 571 - protein, 32 aa, Human
  unsure 23: unknown amino acid
  unsure 24: unknown amino acid
  unsure 25: unknown amino acid
  unsure 26: unknown amino acid
  unsure 27: unknown amino acid
  unsure 31: unknown amino acid
MQILTINIIIIKISYLLPAKKKXXXXXKKKXG

SEQ ID NO: 572 - DNA, 1951 bp, Human
cgcccaggagtcatcggacgccagaatctggccgggttctgagcttgttccgcctccctcccccgggaatggcgctatccgggtcgaccccggccccgtgctgggaggaggatgagtgcctggactactacgggatgctgtcgcttcaccgtatgttcgaggtggtgggcgggcaactgaccgagtgcgagctggagctcctggcctttctgctggatgaggctcctggcgccgccggaggcttagcccgggcccgcagcggcctagagctcctgctggagctggagcgccgcgggcagtgcgacgagagcaacctgcggctgctggggcaactcctgcgcgtgctggcccgccacgacctgctgccgcacctggcgcgcaagcggcgccggccagtgtctccagaacgctatagctatggcacctccagctcttcaaagaggacagagggtagctgccgtcgccgtcggcagtcaagcagttctgcaaattctcagcagggtcagtgggagacaggctcccccccaaccaagcggcagcggcggagtcggggccggcccagtggtggtgccagacggcggcggagaggggccccagccgcaccccagcagcagtcagagcccgccagaccttcctctgaaggcaaagtgacctgtgacatccggctccgggttcgagcagagtactgcgagcatgggccagccttggagcagggcgtggcatcccggcggccccaggcgctggcgcggcagctggacgtgtttgggcaggccaccgcagtgctgcgctcaagggacctgggctccgtggtttgtgacatcaagttctcagagctctcctatctggacgccttctggggcgactacctgagtggtgccctgctgcaggccctgcggggcgtgttcctgactgaggccctgcgagaggctgtgggccgggaggctgttcgcctgctggtcagtgtggatgaggctgactatgaggctggccggcgccgcctgttgctgatggaggaggaaggggggcggcgcccgacagaggcctcctgatccaggactggcaggattgatcccacctccaagtctccgggccaccttctcctgggaggacgaccatctctacccctagaggactgtcactctagcatctttgaggactgcgacaggaccgggacagcaggccccttgacagcccctcccacaggatgtgggctctgaggcctaaaccatttccagctgagtttccttcccagactcctcctacccccaggtgtgcccccttagcctccggaggcgggggctgggcctgtatctcagaagggaggggcacagctacacactcaccaaaggcccccctgcacattgtatctctgatcttgggctgtctgcactgtcacaggtgcacacactcgctcatgctcacactgcccctgctgagatcttccctgggcctctgccctggcctgcttcccagcacacacttctttggcctaagggcttctctctcaggacctctaatttgaccacaaccaacctgggcttcagccacatcagtgggcactggagctggggtgcacatggggcctgctcaccttgcccacacatctccagccagccagggccctgcccagcttcaatttacagacctgactctcctcaccttcccccctgctgtccagagctgaacatagacttgcacttggatgtcacctggagtgtcacatgggagtgttatggcagcatcataccaaggcctactgttgcacatggggccaaaaccagtaaacagccaccttcttggaaagggaatgcaaaggctttgggggtgatggaaaagaccttttacaaatgataccaattaaactgccctggaaagggcataggtgggaaaaaaaaaaaaaaaaaaaaaaaaaaaaaaaaaaaaaaaaaaaaaaaaaaaaaaaaaaaaaaaa

SEQ ID NO: 573 - DNA, 3636 bp, Human
cccaaccaggaagtctgaattccagtatctgggatggatctgaagttctgaggcgaatccgaggaccactgcttgctcaggaaatgcctacagtgtctgtattagaatatgctttgcctcagaggcccccccagggtccagaagatgatcgggacctttctgaacgagcattaccaaggcggtcaacttcacctatcattggcagtcctcctgttagagctgtccccataggcaccccacctaaacagatggctgtacccagcttcacccaacagattctgtgtccgaagcctgtccatgttcggcccccaatgccacctcgttatcctgctccctatggtgagaggatgtctccaaaccagctctgcagtgtcccgaactcttccctcctgggtcacccttttcctcctagtgttcctcctgttctcagccccctccagagagcacagcttcttggaggagcacagctacagcctggacggatgtctcccagccagtttgcacgggtccctggatttgttggtagtccacttgctgccatgaatcccaagttgctacaagggcgagttgggcagatgcttcccccagcaccaggcttccgtgccttctttagtgctccaccctccgctacaccacctccacagcagcaccctcctggcccaggaccccacctgcaaaacctaagatctcaggccccaatgtttagaccggacacaactcacctccatccacagcaccgtcgactcttgcatcagagacagcaacagaatagaagtcagcatcggaatctcaatggtgcgggagatagaggaagtcaccggagcagtcatcaagatcatctccgaaaggatccatatgccaatctcatgttgcagcgggaaaaggattgggtctctaaaatccagatgatgcaactgcaaagcactgatccctacctggatgatttttattaccagaattactttgaaaaactggagaaactgtcagctgctgaagaaatacaaggtgatggccctaagaaggagcgcaccaagcttatcacccctcaggtggccaaactggagcacgcctataagccagtgcaatttgagggctctttgggaaagcttaccgtttctagtgtgaataatccccgaaaaatgattgatgctgttgtgacatctcggagtgaggatgatgagacaaaagaaaaacaagttcgagacaagaggagaaaaacccttgttataattgagaaaacctacagcttactccttgatgtggaggactatgaaagacgttatctcctaagtctggaagaagagcgacctgccctaatggatgacagaaagcacaaaatttgtagcatgtatgacaacttaagggggaaattgcctggacaagagaggcctagtgatgaccactttgtacagatcatgtgtatccgaaaagggaagagaatggttgcccgtattcttcctttcctctccacagagcaagcagctgacattctcatgacaacagccaggaacctccctttccttatcaagaaggatgcacaagatgaggtgctgccatgcttactgagtcccttctctctccttctctatcatcttccatcagtgagtatcaccagccttttgcgacagctaatgaacctacctcaaagtgcagctacaccagcactctccaatcctcacctcactgctgtgctccagaacaagtttggcctgtcactgctcctcatcctcctgagccgtggtgaagacctacagagttcagaccctgctacagaatcaacacaaaataatcagtggacggaggtgatgttcatggcaacacgagaacttctgcggattccccaagcagccctggccaagccaatctctatacctacaaacctagtgtccctcttttctcgctatgttgaccggcagaaactgaacttgctggagacaaaactgcagctagttcaggggatacgataaaagatctccaaatgtgtcctgtacctccttttggctgccacctgcactgctgccatcaccaatggagtgtttttaatgagggaaggaaggtagctttttccccaaagcaaagtcttgtgggatcgattcctgtttacaggggttgtctctctaaatgtcagatatttccccactgctctatgaaatttggctgggtgatacttctgctggtttctttaccttctgtgttacagttctgcatgtcctacttttactcagttctgttttgcattttctttgccctagagacacaagtgtaatctctccctttatccctccactactccacctcagagtagattgtagcctgccaaaggattccttccctcatcctattgaagttgttttttcattgccccatattaatatgactatagaagagccaattaagtagaaatcaagatatacacacacacatagatacacacacacacaccccatacatgtatttatgtggtcttcagagggtccttaaagaatgaattttagattgaaaaatatttagttgtctcattacctcttctaaacacaaaccagctgatgtattttaatctgtttctgttctatcttgtaattaatttggtgggttctacttgttttaacataaataaagagtatgcagcacgtttaataaaatcagaactcttaattggcttatgcccaggtctaggctgagaagtcctttttcttcttcccacctttatttccttagtttctgtccaccttaatcgaaacaacacatggttatgtctttttcctgctacaactacagggtacttgagcctttcccctcaagtgcattcgaagtcacccaggatgatcctcactagtagcctgctttggcagtgtggctttttgcacacttgccctgtcttcctgagactacttcagtaagccatgcttccttcttccccacttttatttggtgtcatgaatagaaacttccaaatgtaaccatggaagctaagtttggcctgctttgctttttagtctccacaccatgggcagaactgctgtctttactacttcatctcacccaagtcccgttcccaggcagccaggggcctgggtttgaataattgcagggccagcctgccatgatctttctcacttactcctctcccattcagcaatcaaccagactaaggagttttgatccctagtgattacagccctgaagaaaattaaatctgaattaattttacatggccttcgtgatctttctgctgttcttactttttcgaatgtagttggggggtgggagggacaggttatggtatttaaagagaataaacattttgcacatacatgtattgtacaacagtaagatcctctgttaaaaccagctgtcctgttctccatctccatttcttcccatgctgtaaccccaggctccaccagctgttccccagtgatgttacctagcttccctctaccgttgtctactgaccatttccactacatgcctttcctaccttcccttcacaaccaatcaagtgaatacttgattattatctcttccttactgtgctttatcttttttgtttggattggttctaattaatgaaaataaaagtttctaaatttacatttttatagggtattgtaaataaaaacaaattgtatactt

SEQ ID NO: 574 - protein, 627 aa, Human
MPTVSVLEYALPQRPPQGPEDDRDLSERALPRRSTSPIIGSPPVRAVPIGTPPKQMAVPSFTQQILCPKPVHVRPPMPPRYPAPYGERMSPNQLCSVPNSSLLGHPFPPSVPPVLSPLQRAQLLGGAQLQPGRMSPSQFARVPGFVGSPLAAMNPKLLQGRVGQMLPPAPGFRAFFSAPPSATPPPQQHPPGPGPHLQNLRSQAPMFRPDTTHLHPQHRRLLHQRQQQNRSQHRNLNGAGDRGSHRSSHQDHLRKDPYANLMLQREKDWVSKIQMMQLQSTDPYLDDFYYQNYFEKLEKLSAAEEIQGDGPKKERTKLITPQVAKLEHAYKPVQFEGSLGKLTVSSVNNPRKMIDAVVTSRSEDDETKEKQVRDKRRKTLVIIEKTYSLLLDVEDYERRYLLSLEEERPALMDDRKHKICSMYDNLRGKLPGQERPSDDHFVQIMCIRKGKRMVARILPFLSTEQAADILMTTARNLPFLIKKDAQDEVLPCLLSPFSLLLYHLPSVSITSLLRQLMNLPQSAATPALSNPHLTAVLQNKFGLSLLLILLSRGEDLQSSDPATESTQNNQWTEVMFMATRELLRIPQAALAKPISIPTNLVSLFSRYVDRQKLNLLETKLQLVQGIR

SEQ ID NO: 575 - DNA, 1920 bp, Human
gtgacgttatttcattacacggcttctcggcattccacaggtttccctccgcctcctgagggcctttcctaacccacagagtggattcctggctccagaaaatgggcttggagcgggggccacgttgaggaaggcgaagggcattgtgggggcgttatgtaaaagtaggaccccaaccgacagatcctagtgctcgcgccacctgggcgcgcggagctttgctcgtttactattgaaaaagttccagcgcgggaaactgaacccggagctttgcgcacgcccgagccctcaagtaatgtgggttgtggtttttgttgttgttgtcgccacgcatgcgtcttcgtgccgtgtggctatttgattgtgtcaactcttctgattagaatggcgccattttgcggtacggaagctacacagcaacacgtataggagactctccccgagatcttctagggagtgacccatctatttttgtttgggaagaggaaactccgaaatgggatcgcggaagacttaaagggccaggctgatttttttttcctactggtctctgaggctgtggttgctacagggtcaccacgagcttggcttacttgtctcatccttcccttgcctggtatcattttctcagttctcccaaaagccatgtcccggcccttgctcatcaccttcaccccagccactgaccccagcgacctctggaaggatgggcagcagcagccacagcccgagaagccagagtccaccctggatggggctgcagcccgagctttctatgaggccctgattggggatgagagcagcgctcctgactcccagagatctcagactgaacctgccagagaaagaaagagaaagaaaagaagaataatgaaggcaccagcagcagaagcagtggcagaaggagcatcaggaagacatggacaagggagatcccttgaggctgaggataagatgactcaccggatactgagggcagcccaggagggggacctgccagaacttaggagactgctggaaccgcatgaggcaggaggagctggggggaatatcaacgcccgggatgccttctggtggaccccactgatgtgtgctgctcgagcgggccagggggcagctgtgagctatctcctgggccgtggggctgcctgggtgggggtctgtgagctgagtggcagggatgcggctcagctcgctgaagaagctggcttccctgaggtagcccgcatggtcagggagagccatggagagacaaggagcccggaaaaccggtctcctactccctccctccagtactgcgagaactgtgacacccacttccaagattccaaccaccgcacatccactgctcacctgctgtcactgtcgcagggtcctcagcctcccaaccttccacttggggtgcccatctccagcccgggcttcaaactgctgctgagggggggctgggagccaggaatggggctgggaccccggggtgagggccgtgccaatcccatccccactgtcctcaagagggaccaggaaggactaggctacagatcagcaccccagccccgagtgacacatttcccagcttgggatacccgagctgtggctgggagggagagaccccctcgggtggccacactgagctggagggaggagagaaggagggaggagaaagacagggcttgggagcgggatctaaggacttacatgaacctcgagttctgactttggtaaagtctgaccctagtctgctgctgaagtctgaacttgggcctctgacctgggccctttgacttccccttcctgggatctgctcagatgcagatcctgaagtttttggtcaataggctctgtcttcgtgagagacgggctgagagtcagaaataaatcaaccatttgtggtttaaaaaaaaaaaaaaaaaaaaaaaa

SEQ ID NO: 576 - protein, 356 aa, Human
MSRPLLITFTPATDPSDLWKDGQQQPQPEKPESTLDGAAARAFYEALIGDESSAPDSQRSQTEPARERKRKKRRIMKAPAAEAVAEGASGRHGQGRSLEAEDKMTHRILRAAQEGDLPELRRLLEPHEAGGAGGNINARDAFWWTPLMCAARAGQGAAVSYLLGRGAAWVGVCELSGRDAAQLAEEAGFPEVARMVRESHGETRSPENRSPTPSLQYCENCDTHFQDSNHRTSTAHLLSLSQGPQPPNLPLGVPISSPGFKLLLRGGWEPGMGLGPRGEGRANPIPTVLKRDQEGLGYRSAPQPRVTHFPAWDTRAVAGRERPPRVATLSWREERRREEKDRAWERDLRTYMNLEF

SEQ ID NO: 577 - DNA, 4026 bp, Human
tcgactatgaatgctgatactgctccaacatctccttgtccttccatatcttcccagaactcaagctcctgctccagcttccaggaccagaagatcgccagcatgttcgatcggacttccagagtacccgccagcagcacttcctcaccggggctcctcttcacagaactggctgctgccctggatgccgaaggggaaggaatcagcgaagtacaaaggaaagctgtcagtgcaattcacagcctgctaagttctcacgacctggacccacgctgtgtcaaaccagaggtgaaggtcaaaatcgccgccctttacctacctttagttggcatcattttggatgctttgccacagctctgtgactttacagttgcagatactcgcagataccgcaccagtggctcggatgaagaacaagaaggagccggtgccattacccagaatgtggctctggccatagcagggaataatttcaatttgaaaacaagtggaatagtgctgtcttccttgccctataagcagtacaacatgctgaacgcggacactactcgcaacctcatgatctgcttcctctggatcatgaaaaatgctgatcagagcctcattaggaagtggattgctgacctgccatcaacgcagctcaacaggattttagatctacttttcatctgtgtgttatgttttgagtataagggaaaacagagttctgacaaagtcagtacccaagtcctgcagaagtcaagggatgtcaaggcccggctggaagaggctttgctgcgtggggaaggggccagaggggagatgatgcgccgccgggctccagggaacgaccgatttccaggcctaaatgaaaatttgagatggaagaaagagcagacacattggcggcaagctaatgagaagctagataaaacaaaggccgagttagatcaagaagccttgatcagtggcaatctggctacagaagcacatttaatcatcctggatatgcaggaaaacattatccaggcgagctcggctctggactgtaaagacagcctgctgggaggtgttctgagggtgctggtgaattctctgaactgtgatcagagtaccacctacctgactcactgctttgcaacactccgtgctctcatcgccaagtttggagacttactcttcgaagaggaggtggaacagtgtttcgacctatgtcaccaagtcctgcaccactgcagcagcagcatggatgtcacccggagccaagcctgtgccaccctttacctcctcatgaggttcagttttggagccaccagtaattttgcaagagtaaagatgcaagtaaccatgtccctggcatctttggtgggaagagcaccagactttaatgaagagcacctgagaagatccttgaggacaattttggcctattcagaagaggacacagccatgcagatgactccttttcccacccaggtggaggaacttctctgtaatctgaatagcatcttatatgacacagtgaaaatgagggaatttcaggaagatcctgagatgcttatggatctcatgtacagaattgccaagagttaccaggcatctcctgatctgcggctgacctggctccagaacatggcagagaaacacaccaagaagaagtgctacacggaggctgccatgtgcctggtgcacgccgctgcgttagtggctgagtatctgagcatgctggaggaccacagctacctgcccgtgggcagtgtcagcttccagaatatttcttccaatgtgctggaggagtctgtggtctctgaggacaccctgtcacctgacgaggatggggtgtgcgcaggccagtacttcaccgagagtggcctggtaggcctcctggagcaggccgcggagctcttcagcacgggaggcttatatgagacagttaatgaggtctacaagctggtcatccccatcctagaagcgcatcgagaattccggaagctgacactcactcacagcaagctgcagagagccttcgacagcatcgttaacaaggatcataagagaatgtttggaacctacttccgagttggtttctttggatccaaatttggggatttggatgaacaggagtttgtctacaaagagcctgcaattaccaagcttcctgagatctcacatagactagaggcattttatggtcaatgttttggtgcagaatttgtggaagtgattaaagactccactcctgtggacaaaaccaagttggatcctaacaaggcctacatacagatcacttttgtggagccctactttgatgagtatgagatgaaagacagggtcacatactttgagaagaatttcaacctccggaggttcatgtacaccaccccgttcaccctggaggggcggcctcggggagagctgcatgagcagtacagaaggaacacagtcctgaccactatgcacgccttcccctacatcaagaccaggatcagcgtcatccagaaggaggagtttgttttgacaccgattgaagttgccattgaagacatgaagaagaagaccctgcagttagcagttgccattaaccaggagccgcctgatgcaaagatgcttcagatggtgctgcaaggctctgtgggagctactgtaaatcagggaccactggaagtagcccaagtgtttttggctgaaattcctgctgatccaaaactctatcgacatcacaacaagttgaggttatgctttaaggaattcatcatgagatgtggtgaagctgtagagaaaaacaagcgtctcatcacggcagaccagagggaatatcagcaggaactcaaaaagaactataacaagctaaaagagaacctcaggccaatgatcgagcggaaaattccagaactgtacaagccaatattcagagttgagagtcaaaagagggactccttccacagatctagtttcaggaaatgtgaaacccagttgtcacagggcagctaagaaaagccatcttcattcgtggagactgtggccctgcaaccctggagaaggacttgctggtacttaaaaaatgggacatttgccacccaggactgactgtacactccctgatcagccagcactctggaagctttgggatcccaggaaccatggaattattcccaaatggactctgaccagatttttgccatactggggggtggcgggatggaggatgggtactcaggcatgactgcgtatttattaaagtgtgtttttccacaatgtaccaaacaaggcataagcagcttctcctgctgactggccaatcactgcccatctgagagatgatttcctctggcccatatttgaatttattggagtaactcaaattgcctgaggaaaaatggaaaaattatccaccagtcgattcaaactgaatttcactctttataggaaggcagggcaaacttgtaggagtacgaaacattttcaataaatctacaaagggaagccttactacaattccaaaaatcatcatggttggaaatttgggaggagattatttgtgaacttgttacccttttggtaatggtggactaattgctgtatagttatttttgttttattattactgttacattaatttaacatgcatttatagaagaatacattcaaagcactgatgtaggagatacacggtacttggagcagtcagccaaaaatcacagatactgctttcacttaaatggaaacaattctccgataatgctttgctttttttcttatgtcactcttgtgtactatctatttttctcctctctgggaccaagtttctttttataaagcaataatatctctgttttcatttcagaacattgtgctgtctgtcagcatatgtatatcagctacaaaatatattcaactttgacttcttttgacaaaggactttaggaaaaggaggaacaaagacattatttgagaattaaattatatatttttaatatgactgtgaccttgactgataataaagatgtaataagaattgcaagctaaaaaaaaaaaaaaaaaaactcg

SEQ ID NO: 578 - DNA, 3347 bp, Human
agttgggtaccgggaggggcgaaggcgggcggcagaggcgatcagaagtttccaagggtcacttgtgtctcgtccgtgggaagaccgggggagcccagaaggccttggtgtggaattctgagagctgattcctgccttgtcttctccactgttcctggaggaatccgagaagagcagagcggagggagccccagacacggtccgcgggagagctgtggggcttggtgagtgtttcgtggcctctcgggttggtcagcacccccagccagctggcccaggacccctctacagaagtccaggagagcaggcgtcaccaagatgtccaaccccttcctgaagcaagtcttcaacaaggacaagacattccgccccaagcgcaagtttgagccaggcacccagcgcttcgagctgcacaagaaggcgcaggcgtcgctgaacgccgggctggacctgcggctggccgtgcagttgcccccgggcgaggacctgaacgactgggtggctgttcacgtggtggacttctttaaccgcgtcaacctcatctacggcaccatcagcgacggctgcacggagcagtcctgccccgtcatgtcggggggccccaagtatgagtaccgctggcaggatgagcataagttccggaagcccacggcactctccgcgcccaggtacatggacctgctgatggactggatcgaggcgcagatcaacaacgaggacctcttccccaccaacgttggcactccgtttcccaagaacttcctgcagacggtgcggaagatcctgtcgcggctgttccgcgtgttcgtgcacgtctacatccaccactttgaccgcatcgcgcagatgggctccgaggcccacgtgaacacctgctacaagcacttctactatttcgtcaaggagttcggcctcatcgacaccaaggagctggagccactgaaagaaatgaccgcccggatgtgccactgagagccccgcgggtctcccggtgcccgaaccgccgctggggcctcggagacttggaggaggacgctctggaaccatcatcccgcttctctccggcctgagcatctcagggagaccaggggccgagccgctgagcaggtgttggtcctcaggagctccaaccccggacggcagatgccttcctcagtctcgagcctcagtctcccgtctgggactaaaacgtgaactctgtaattctatgtgttactagcaaccggaaaagcccactgtgtttttaaaccacttccactttccaggaggctggatggcttccagggtcactccttgccctgggtggctcccaggctcctggaacttctgcctccacctcgctggggagcccccagggctgctgtggccacagccctgcctgggcctgtctctcaagggcacccagcttgctcggcctcctacatgtctcccgttggggaggcaagaggctgaggggcttccgagcccctgagagcggacatctcctcccgcaggcctttactccgcactccccactggcagccgctggtgtctcttcacacagaggcacaacctggacccaggcagcctctttcctccctccccaatctcttccatttttctacagatttttttttttttggtcatactagagacaggggtctcgctgaactcctggcctccagtgatcctccatcctcggcctcccaaagtgctggaatcacaggggtgagccaccgcacccagccctctctcttcctcaatgcactctgcttcttccgttcttccgaaacattcagctgactgtatccagggcttcctggactcctgggaccccacgtcctgcaccccggcttctgactcatttcctaagggcccctttgtgtatcataaagggtttgatttttatagtcacatttacaaccatcttgagatttttattttttttgaacggagtctcccactgtcgcccagactggagtccagtggcacaatctcggctcactgcatcctccacctcctgggttcaagtgattctcctgcttcagcctcccaagtagctgggattacaggtgtgcgccaccacgcccaggaaattattgtagttttagtagagacaagatttcaccatgttggccaggctggtctcaaactcctgacttcaggtgatccgcctaccttggcctccaaaagtgctgggattacaggcatgagctactgcacccggcctaaccaggctggagtgcagtggtgggatctcggctcactgcaagctccgcctcccagattcacgccattctcctgcctcagcctccccagcagctgggactacaggcacccaccgtcacacccggctaatttttttgtattttagtagagacagggtttcaccgtgttagccaggatggtcttgatctcctgaccttgtgatccaccagcctcagcctcccaaagtgctgggattacaggcgtgagccactgtgcccggccaagaatttttttatcgataacatagtgagctctctgcctcttcggaacgatgtccactttgcttatgatcaacccaagcaggactcttctctccctggacgcctctcccctggtctggaatcttccagttctgccagaattggcctttcccagatgctgcaaacttccagttgaacccctttttctgtgtggcccctggggctgcgagaccaaaatccatgagttctgtgtaccctagacctttggaaggtgagagcagggccctgagaaaaggcagccacctcctctccctggctgaacccctgccaccctactcctcaccagaattgtcagtggcctttcaccacagtggtccttcctgcctgagccctgcactgtcccagaccacacagaagtctggtcacctctgggcgcctgggatggtcaccgaagagaagcacgctgtccccgtctctcctggcttctgccagaaaatcgaacaagtgcaattaacacactgttactgccgaagcctgaaactcccaggacttgtccttgatccttccagaaaccaccaggtccggcacttggagccccccggagagggacctcccagccgagccctcaaagaactccatgaaatcaggaactgcttgatgaaatgtatctccttgtacctggaagatgaagcccaaacacccacacctctgtctcccccagggctcgggatgtctccagcagcccggccacgcagcttcccaggtgggctcggggaggtgggagcagggaccatctctgtcccctccaccctcactccatccacctcggagaccaccctcccccagccagatacggaataaaactacagacgcagacgtcggaaaaaaaaaaaaaaaaaa

SEQ ID NO: 579 - DNA, 4220 bp, Human
tggcggtcttgcaggcgggcggaccctcggccgcgctcggggctccggcgccgccgctcctcctgctcggcctgagctgcccgggctcggcgcgcgcttggggcgaggctcggcgggcgcggacgcgcagcatggcggtggaggacgaggggctccgggtcttccagagcgtgaagatcaagatcggtgaagccaaaaaccttccctcttacccggggccgagcaagatgagggattgctactgcacggtgaacctggaccaggaggaggttttcaggaccaaaattgtggaaaagtcactctgcccgttttacggagaagacttttactgtgaaattcctcggagctttcgtcacctgtccttctacattttcgatagagacgttttccggagggattccatcatagggaaggtggccatccagaaggaggacttgcagaagtaccacaacagggacacctggttccagctgcagcacgtggacgctgactcggaagtgcagggcaaagtgcacctggagctgcggctgagcgaggtcatcacagacactggggtcgtctgccacaagctcgccacacgcatcgtcgagtgccagggcctccccatcgtgaatgggcaatgtgacccctacgccaccgtgacgctggcaggacccttcagatcagaagcaaagaagacgaaagtgaagaggaagaccaacaatccccagttcgatgaagtgttttattttgaggtgacccggccctgtagctacagcaagaagtcccactttgactttgaggaggaagacgtggacaagctcgaaatcagagttgacctctggaatgccagtaacctgaagtttggagatgaattcctgggagaactaaggatcccgttgaaagtcctgcggcagtccagctcctacgaggcgtggtacttcctccagccccgggacaatggtagcaagagcctaaagccagacgacctgggctccctgcggctgaacgtggtatacacggaagaccacgtgttttcttctgactattacagccctctgcgggacctgctgttgaagtctgcggatgtggagcccgtgtcagcgtctgcggcccacatcctgggcgaggtttgccgggagaagcaggaggcggccgtcccgctggtgcggctcttcctacactatggcagggtggtgccattcatcagtgccatcgccagcgcggaggtgaagcggacccaggaccccaacaccatcttccgaggaaactcactggcgtccaagtgcatcgacgagaccatgaagctggcggggatgcattacctgcatgtcaccctgaagcccgccatcgaggagatatgccagagccacaaaccctgtgaaatcgaccctgtgaagttgaaagacggagaaaaccttgaaaacaacatggagaacctacggcagtatgtggaccgcgtcttccacgccatcaccgagtctggggtgagctgcccgaccgtcatgtgtgacatcttcttctccctccgggaggcggcggccaagcgcttccaggatgacccggacgtcaggtacactgcagtgagcagcttcatcttcctgaggttctttgcgcccgccattctctcccccaacctcttccagctcacgccgcaccacacggacccccagacgtccaggacgctgacattgatctccaagaccgttcagaccctcggcagcctgtccaagtccaaatctgcgagttttaaggagtcctacatggctacattttatgaattcttcaatgagcagaaatatgctgatgcggtgaagaacttcttggatctgatttcgtcctcggggagaagagaccccaagagtgttgagcagcccatcgtgcttaaagaagggttcatgatcaagagggcccaaggacggaagcgctttgggatgaagaattttaagaagagatggtttcgcttgaccaaccatgaatttacctaccacaaaagcaaaggggaccagcctctctacagcattcccatcgagaacatcctggcagtggagaagctggaggaggagtctttcaaaatgaaaaacatgttccaggtcatccagccagagcgtgcgctgtacatccaggccaacaactgcgtggaggccaaggactggatcgacattctcaccaaagtgagccagtgcaaccagaagcgcctcaccgtctaccacccgtccgcctacctgagcggccactggctgtgctgtagggcgccatccgactcggctccgggctgctcgccctgcactggcggcctcccagccaacatccagctggacattgatggggaccgtgagacggagcgtatctactccctcttcaacttgtacatgagcaagctggagaagatgcaggaggcctgtgggagcaaatctgtgtatgacggcccggagcaggaggagtattcgacgttcgtcattgacgacccccaggagacctacaagacgctaaagcaagtcatcgctggggttggggctttggagcaggagcacgcccagtataagagggacaagttcaagaagacgaaatatggaagccaggagcaccccatcggagacaagagcttccagaactacatccggcagcagtccgagacctccactcattccatttaaagtctgcgggacgcgcccagtggcgccagcaagctgcccatgcaaagccgcagcctttgggagggagaagagaaggaagagcgcagagccggcaaagtgagatgcacgccgtcccggcccatagacaagtggcgctggggtttccctctcccagaaccgctgccaccaccgccacgccctccgcagaaagcccacctggccctgtggaacgtgtcgtcatttgattctgtgctttttgctccttgtttgtggggatctggggatcagctgaaggatcaggaagtgtgggctgtgccctagccacaccacagccagcctcagggagccacggcccgtctagtcgactgtgacatgcacctccggccgtgtgtgcgtcagtctcgtgcacgtctgtcttgcgtgcacggtgcgtgtgacgctgggctctgtggctctgtgcccgggaggcctgctggccccgcctcggctttcggcttcatcacattgggaggttcagagcattactctcccactgtgcctgccatccaggcagccatgggaggcggcctccctgttccactttcgaggttcgtttgattcctggctgaggggtcagttttatggctgggaggtgcagaattacacagaagtcccagtctgaggatgtccttggtgcttgggggatacgggttctgtccacagagtcccttggagggaaaggtgtgggctccagcttctccaggcgtctgcggagcccacagttgaagcccacatcgttttgctgttgaatggggtttaaaatcagaattaacatttgccaccccccgtggaagtttgaagattttaaaaatagaaatgtacatttttcaagctgtttttctttatgtttttgaaggaccatttttaattagctctttgatacaaagtaactcagaacgtcaaaacctatacccactaaagggaaggctgccgggaaggcaaatggaacaggaatggagcctgtctcaggaaggccagctgcaggtcctccagaaaatcaaagaagggaagaaactctgagtttgaggtacaggggcttcggggtgcagacgtccctccagggcccatggtcagtattgcacctgtgttatgaacccccagatgctgtgcagggcaggggcgggggctgctgttttattggggaggggagcatcctaaaaatggggtccaggcagacccctccagacctcacactgccgaggaggcctttcccaaagggcgtcctcccgggatgcagacggcaggtgtgtgggaagcgccgtttaaatacacagcacgacgtatccttgtaccgacttctcccggttcttgtttgaaaatactgtagttcaggctcttgatctagatggcagataggaactttcttgtcacaaaaatactggaggaaaatgttgtaaaaatagacttttggacacacagctgttggggctgcactgagctgcaatttttaacatggatttataacttaatgtttctgtttataaaatactaatgatttgcaatgtattttactggccaattaaaacagatgttttattcaaaaaaaaaaaaaaaaaaaaaaaaaaa

SEQ ID NO: 580 - DNA, 2594 bp, Human
gtataatctaaagctctgagagctcttaagtcaggaatgctgagtattatagtatattgaggtcagatgaaattttacatttttgtgtgttctgttgcattccttctggtagtttctatgactgcattactccagcactcatgattgattttatcttctaattttcttccaagtattttattttttattagttttctttggcttgatacttttaaatatgttactagtcacttgaaagcctctcccccaaaagtatttggtttgtatgctttgtctgtggcagctataacagtggtaagaacattttgaagatagctttttaaaggaaccactgattttttcaaaaatcatcctgggggaggaattttggcatttcatttgagcagggattttgtcagaaaatgtgttttgatggtaggtcagcagcagtgctagtctctgaaagcacaataccagtcaggcagcctatcccatcagatgtcatctggctgaagtttatctctgtctctcaggataaatccctgtaggacaaatccctactatcatttctaccttttggggtgacatgtggaatcatacaaaggcttaggaagaaatacgtttgtttaaaccaggatgctttacttacttgaagtgacttcaatctagatttcttttaatatttaacaaatttttaattctatgatcagccacagtcagctattaccataaattggtctgtttattttgaagatcacggctgcttcattttgcaggattaagtagggctaatgtatcttagagttaagatcttgaattaaagtgagttttagaaatagtgttacataccttttcagttgttttcaagaggctttttgttgcctttgtagccctgaaagctgttggtatattttttccctcatggacccaatagaaaagttgtatatttatttggattatatttacattctgtcctttgtaaatgtttggtgtaacttgcacttttttaaatgacccagtttgggtattagcaacttaagaaattccctcatcaagtaattctcaactttttagtctttctcctctcttcaaatcatgtgactttttaaatggaagtttttcattgattaaaatattttagcacctaaaagctagccttaaaaacagctgtaaaagaaaaacatcaggaaattagatatgactagcccagttaattaaaagacgggctcaaaccttgttttattctttttcatcttggatgaagattgaagggaaaataactcaagtgcataatatttattttcaatttttaatgagactttatcctcatcacaacattaatactgtacatagtatgccaaaatatccattaatttgtctagaatagtacaagactttttaaagcaattgtcctcacagagaccacatgtaatatactgaaatatgttcatttttaatggctttgttaacatcaaagaaatgctgcctaaatttgatttcagatgaggaaggagaaagtaaagtgtgcatagtaaggctgtaggtgaagagttgtgagataaatagttcactcagttgtacaaagcacaactagaactttttgttgggaggcttacatacatcttgaatattcttaatgtaataatgttgactattaagttggctacacagtcactgtatgtactaggaactggtttccttgacattctagaatcaatggctaggagaggcattaatctttgaggggctgaacatatcatgaagctgagtcagtatggaaaattttcaaataaacagggtgctgaagttccatctgtctcatctgcttatgataagttcttattgattagtgaatgtagcttaagcctttgtatgtgtcctcagggggcagaccgactttaagagggaccagataacgtttgaatggagggattatatttcaggtgttttagcttgaaatttattttttacaaaaagacaaatttaaaaaatatataaataaaatagaacaaagccggtgatgcaagttgatattataaacaggcagttttagcacagaaagaaaatactgacctgtctgcattctggtacggtgggtgcaggtcccagctgggtatgacatgatacatttttaattattctcaccagcaagtaaaaggaaaatgaacagtcttttggaattgtctttgaaaaggatcaaagagtaggaaattcacatttgacctaacattacttgcctatagaagtatggcatttccaagctttgtctgaggagcatctcagagaagtgagagtaaatctgagttagcttaaaaattggtagggaggaagaaaatctctgcaaataatgattttatgtttgttggccaagtgaaatgatctatcattgtgttgggaggttttattttcttatgtttttaaaattggtaaatgctttatagatgtatttttatccaagtgccactccaatttgtgtatgtaataaaattatttatattaaaagtgggaaataattgtcaacatttttttgagtatagatttattaggggtggcaaagaagagtgctagttagcagttttccatgtaaagttgtccttgactgattgtccacatgt

SEQ ID NO: 581 - DNA, 1812 bp, Human
gcggaggggcgggccctggccgggtggtcccgggcggatcccgggaaggcggaaggcttcggcagagctgcgccgccgaggctgagcggtcccttctcgctgcggccgcccaggtgcccgcgcccgtggcgctatggaggcggcgctgctggggctgtgtaactggagcacgctgggcgtgtgcgccgcgctgaagctgccgcagatctccgctgtgctagcggcgcgcagcgcgcggggcctcagccttccgagtttacttctggagctggcaggattcctggtgtttctgcggtaccagtgttactatgggtatccgccgctgacctacctggagtaccccatcctcatcgcgcaagatgtcatcctcctgctctgtatctttcattttaacgggaacgtgaagcaggccactccttacatcgctgtattggtgtcttcttggttcatccttgccctgcagaagtggatcatagacctggccatgaatctatgtactttcatcagcgcggccagtaagtttgcacagctccagtgtctgtggaagacgagagactcaggaactgtgagtgcgctgacttggagcctctcttcctatacctgtgcaacaagaataatcacaaccttaatgaccaccaatgattttacaattcttctacgttttgtgatcatgctggctttaaatatatgggtaacagtgacagtacttcgctaccggaagaccgctataaaggctgaatgatggatacattattccttcacacagtggattttgagtaactgaaccaaaggaaaaagaagctctttgctaaattaaggtcttttataaatttagtaaatcagtttataatctttaaagccaaaggtttttttagacttgaaagaaagagccacttaaattcttgtttaaaaataccaatttgcctcctccttcctcacttcgttaggttatggtagtgctcagacatctgcagtgttgaggccagtcactgttggaagtcatccaagaagcccattttgaggccattttgagccttactcttaagttctctatgaagaactacattgatttgttggctttcagaatcttttaggaaataaatcctctccaggacaaaaatgaacatgaatggagtggcattttgttccaagtcagaggtgggcacctataataaatgactagggttcactttctgggactgatgtttaattgtaacacagatacaacagggtggccttgttgtgtataatacggtattatacctgcatgtgctctagcaaggataccaaggcaagcatacatgtagctggcttgagtttgtaccaaaacagtccttcaactttgcactgtgccttaagtaattactaacaaaaggtactaggattagctgcaatctctactttcgatgaggaaatcccagtaagctttctgattcaagtacaatgctgccattttttaaagggccacaactatagaattaccactgttggaatttggtacaaaatatgttttgtctattgaaaacatacacggtaaatggtgttgttaggtaggttctgtccagttcttagggacttttttcacattatagcatttttaccctaaacatgatgttgagattattatatactgtattttcttctaaattaaccctaatgtttaaaaactcactttccccctttaattgaaggcattgttttgttagatgcagtaatgatgtttaccagagattattgtttcctatgcaaaataaattttcatattttgaattctgctgagtcttaaaaaaaaaaaaaaaaaaaaaaaaaaaa

SEQ ID NO: 582 - DNA, 6873 bp, Human
ccccaaccggcagcccatcggcatcgtgctcacggtgctgggagtggtggtcctggacttcagcgccgatgccaccgaggggcccatccgtgcctatctgctggacgtggtggacagcgaggagcaggacatggccctcaacatccacgccttctctgccggcctcggcggagccatcggctacgtgctgggtgggctggactggacccagaccttcctgggcagctggttccggacccagaaccaggtgctcttcttctttgccgccatcatcttcacggtgtccgtggccctgcacctgttcagcatcgacgaggagcagtacagcccgcagcaggagcgcagcgctgaggagcccggcgccctggatgggggcgagccgcacggcgtccctgccttcccagacgaggtacagtcggagcacgagctggccctggactacccggacgtggacatcatgcgcagcaaaagcgactcggcgttgcacgtgccggacaccgcgctggacctggagcccgagctgctgttcctgcacgacatcgagccctccatcttccacgacgcctcctaccccgccaccccccgcagcaccagccaggagctcgccaagaccaagctgccccgcctggccaccttcctcaaggaagccgccaaggaggacgagaccttgctggataatcacttgaatgaagctaaagtcccaaacggaagtggctcccccacaaaagacgccctcggcggctacaccagggtggacacgaagccctcggccacgtcgagctccatgcggcggcggcggcacgcgttccgcaggcaggcctccagcaccttctcctactacggcaagcttgggtcccactgctaccgctaccggcgcgccaacgccgtggtgctgatcaagccgtcgcgcagcatgagcgacctgtacgacatgcagaagcggcagcggcagcaccggcaccggaaccagagcggggccaccacctccagcggggacaccgagagtgaggagggggagggcgagaccacggtgcgcctgctgtggctctccatgctgaagatgcccagggagctgatgcggctgtgcctctgccacctcctcacctggttctctgtcatcgccgaggccgtgttctacaccgacttcatgggccaggtcatcttcgaaggcgaccccaaggccccctcgaactcgaccgcctggcaagcctacaacgccggggtcaagatgggctgctggggcctggtcatttatgccgccactggtgctatttgttcagccctgttacagaagtacttggacaactacgacctgagcgtcagggtgatctacgtgctggggacgctgggcttctctgtcggcacagccgtgatggccatgtttcccaacgtctacgtcgccatggtcaccatcagcaccatgggcatcgtctccatgagcatctcctactgcccgtacgccctgctgggccagtaccatgacatcaagcagtacatccaccacagccccgggaactccaagcgagggtttggcatagattgtgccatcctgtcctgccaagtgtacatctcgcagatcctggtggcctctgcccttgggggcgtggtcgacgccgtggggactgtccgcgtcatccccatggtggcctctgtgggctctttcctgggcttcctgacggccacattcctggtgatctatcccgacgtgtcagaggaggccaaggaggagcagaaaggcctgtcttccccgttggccggcgaaggcagggccggcgggaacagcgaaaagcccaccgtgctgaagctcacgcggaaggagggcctgcagggaccggtggagacagagtccgtggtctgagccgcactcccgtttacacacattccagcgggcgggtgggcgggcgggcgggcggcggggccaggccatgggcgggagcagagacaccgcggaaccctgcagatgctgtggccgacccggcagtgcgggccagagcccctccgcccccatagccacaattcagtagtcgtagggtaggtttgagctactaagcaaataccacactaaccactttttcgataattaaaagaatcatttgaaatattttttttaattgaaaaagatattttaatttcagctcttttattctgcaggtgtattattctgcatgtttttaaatgatataaaacatttatatagacaataagcaacttagaaaaaataagattttgcatttctaaaattataattgaaaacaaaatctgacattctctgctaagtcttatctgaatgcttcagataatggtagtgtagtcagtgactaaaatatttttatcaaatttcctctctgtagacgcctgcaggtattgacgtctgtcagatctcgtcacattggctggtgccgcagctgttggagagtatttttctttatgattattttagaaaaaaaaattttcttttccacaatgtggttctcttagaagaatgacgtatcttcttttcctcagcgagttggacacattgtgcccagggcagccctgtccttgggcagcgaccgcacaccaaagctgggaggaggctggtccggggggcctgggcagaagacagtgatttgcaggggtggctcccagacaccctgcccagggatgggctgggcaccacctgggggcggagcgtgagctccagacgagctcctgcgtgcgcgtgtgagtgtgtctgcgcccagccatgtgaccctgctcgtcccgtctgaaggactctcctaggaggccaggttgcccctccagacccctcccaacgtcagggggaaggaaacgttgactttcactgcactttgattcgtctctaaaccatttgctggggattcctgagagcagagctcccagcgggccctgcctcccaagtcccgccgcaaggctacctcgggtgtgtggatgtgcgagggcctcccccgcttgcgaaggggacatgcgtgctggaacctgtcggaactccatgccttcctcgcctgctcacctgctcgacgctggaatcgggacaggtgcaaagggacgcagacgtctgggacagctaaggcccgtgtcaccggagggctccgcacagtcgttctggtttcaacgaataagcaaaactcgggcaagtactgcagctatttggaaatgttttccaaaccacagtctctttagaactaagcctatttgaaacggtcggtgtaggcttactgagatcaggagacagggaggccccgcacatcacacagataagtcagacaattgtaattaatacttttgctgcctcaagttgttttttaaataaagtactttgaaatgcatgagaatcatgctgcaatatgatcattctagagcaaatatatatatacacgtatatatatttcaagatgaaactaaagcagtttttaaataaattacttgaattttctgtgtatttaaaggaacgactgtttaatgtacttgatgggcctctggtcttgccgtgtctcctgccgctggtggcactttgtagattgtgtgtttgtgtccgggtggcagttgggtacctgctcacgcacggtgtgtctgccaggccacggtgtcccaggatcgcagagggctgacttcaagacttcaagaacattttctggatgtgtggaaacttgagaatggccttgtgaatctcgtgcttggacagggcaagtccgactactgaaagtgctgccagctttgctgcgagccctccggccagcgggagccccgtgggctgggcactgtggcccttcttctctgggggacggcacccctggcttcctcacctcggccgggcgtccgtggcagctcactctatgcaacttgatcctctagcggctttaagactgtagatcccctctctgagacctggctgtacttgtcaggatctcgaggcgcagctcccgtcttagctggtttctccggcttctcgtcctgacgactataaaacagttggaggcaagaaagcagcggatgtggggtggcagtggcctgacccgaatcaagatccgacccaaaccacaccaaatgtgggttcatctgggggccaccccttgcctgaggcttcccaccctcatctgaaggcccaggggccggatccagggctcaccaaagccgattcctcgccagctgggagtgcagaagtctcagggcctggctgcgacttgatttttaggaggaagaggggcttcgcaacccccctctgaatagtgtgttaacccttgagatcccagcctcgactaatctgaagtaaggacaacaaaggccattcagtgccctccacatggccttgccacagtcactgtcagggtatgaatgtgccggaagccagtgccagccagggacaggcgtgactgttgtgtgctcctcggtgacaggagtcggtggctgcacactttgtagactcgtcaagctgtcagcacttcaggtgtttgcaagcaaagcccttcttagtgtgcaggtcagtgtgcagagcccaaatgaggggaccgcaggggctggggtccagggtcagtagagtcggtttctggagctgccttcctgggaggcaggtgtgggtgaccggggctctggcggtgcgtgtgggcccggcctggccacagcggggaccaggtcacgacatctttggcctcaacccctcccctgcactgagattatttccagattgcactcacttgaaaccgtccgtgtcgtcaccttgtgtcttaagggaagccgagaagaagggcagacgggcaggctgtcttgtctgcaaagcgccattgcgcccgcagcttgtgtgggtcaggctgcagctcgggtgtctgtggcttctaaccttgtacctcagacggatgcagtaacaaggcggggctggggacgccggtcagtgtcaaaggggaggtgctctggctgatagccttgcccgagagggacgaggaggccgtgcgggtgccccctggggaagctggccagccatccagtgctgaggacgcagctggagttgggctcgtggcacccttggggtgtgggctgtgcaggctggtggcctgggtgcctctgcacactgagtggagtgtcaggcagggtgtgtcggttggtcgagtcttgtgtaatgtgcgcagaccagttaccaaactaggataatgttggtctcatttgtggtggttttgttccctatacaagtcagctaagtaaagactcttttaacgagcttccccttaacacatggcagaagtttccaggtgcaggaatgcgagctggcgggaaggggcagaggccgtgagctctcagctgggccggcctgcctgtgtcccctttcctgggtctgtcggcagactggcatcatgacgttccctggtggctgaagagctagctttggagtgttgtttttctcactctcaggcaggggccttagctggaatcctccaacctgccactgaacacgtcagtgctgtgtgctgcctcttggacacctgcccttgaaagcctcaggcccctgggagaagcactctgtccagtcctgtccccgggggggaggcagggccactgagccctcctcagatggttagtggcttccaacagccatcaggagtgtttcttgaatgccccaggtgtggaggacttggtctgtgaccacctagaaccccagagctgaacaggaagccgtccctgcagcaacaagagggctggaagggggagctgcaggccaccctcggctctcccactgctggggcggtgatgttcgggtgacatgtttgaaaaatactcttaaagataccaactgttcccttatatggctaatggtttgtgcagccaccagcgatggcggcccctattagagaccaggtttgttaaaacaccaaatattgctgtccacactagacattaaccggcttcagaaaagatggacaccttttcccacgctgtttcgcttcttaactttggtccagctttagccaccacacagcgtgtgagggactgctgctgcggagtcagcctcgtttgtccctccgcctcccaccagcacgcgccgcttctgagagacaccagctccctgcctccaagcctggtgccacaggcctgtcgtgagggacccctgcttccgagagctcctgggggggttctgcccttcaccacctgggagaggtgtcagttcagttccgagttgaacaaggcccgtgcacacagcatgttgggggcccagcccaaagttcttgtcacctcctcatgcaaagccagccatcaccctccggccagagctcaaggtggccccttggccagcccctccttgggtcctccaggaggactgagcacccctcctagcggcatcccttgccctccacagtgctgccaggggcacgtcgctctgtgccgtggactgagaccatcccctggtgacagaatgacccgtttgttggaaatgcctcgttgccagagaaactccccaggcatctcggaacgaaactatttagttccattgtgaactggccacgggacagctttttatcaacttattaagttggagcactgtaatcgcgcttgctgagttagcagtggtggtaagcgtgtgttaaacacataatgttacgttttaggagagagaggtcgtaaggaagtgtcgtgtcgctcatgactctcttctattagttgggtaacagtggcctcatgtttgtgtctgtgtgtacacagagcccttaggttctgctctgtttctttgccaggtgaatgtttgtggcatgcgctgctgtccacgcccctctgtcctgcgcagggttcagctgtgcggcgccctgatttcctccatgcacacagaacctccttgtgtctgtttctctgttcctctgtggctgactcaataaacttttccctctg

SEQ ID NO: 583 - protein, 618 aa, Human
PNRQPIGIVLTVLGVVVLDFSADATEGPIRAYLLDVVDSEEQDMALNIHAFSAGLGGAIGYVLGGLDWTQTFLGSWFRTQNQVLFFFAAIIFTVSVALHLFSIDEEQYSPQQERSAEEPGALDGGEPHGVPAFPDEVQSEHELALDYPDVDIMRSKSDSALHVPDTALDLEPELLFLHDIEPSIFHDASYPATPRSTSQELAKTKLPRLATFLKEAAKEDETLLDNHLNEAKVPNGSGSPTKDALGGYTRVDTKPSATSSSMRRRRHAFRRQASSTFSYYGKLGSHCYRYRRANAVVLIKPSRSMSDLYDMQKRQRQHRHRNQSGATTSSGDTESEEGEGETTVRLLWLSMLKMPRELMRLCLCHLLTWFSVIAEAVFYTDFMGQVIFEGDPKAPSNSTAWQAYNAGVKMGCWGLVIYAATGAICSALLQKYLDNYDLSVRVIYVLGTLGFSVGTAVMAMFPNVYVAMVTISTMGIVSMSISYCPYALLGQYHDIKQYIHHSPGNSKRGFGIDCAILSCQVYISQILVASALGGVVDAVGTVRVIPMVASVGSFLGFLTATFLVIYPDVSEEAKEEQKGLSSPLAGEGRAGGNSEKPTVLKLTRKEGLQGPVETESVV

SEQ ID NO: 584 - DNA, 1900 bp, Human
agccgcggggagcgaggagcgcgcggagccggccatgggcaagtcagcttccaaacagtttcataatgaggtcctgaaggcccacaatgagtaccggcagaagcacggcgtccccccactgaagctctgcaagaacctcaaccgggaggctcaacagtattctgaggccctggccagcacgaggatcctcaagcacagcccggagtccagccgtggccagtgtggggagaaccttgcatgggcatcctatgatcagacaggaaaggaggtggctgatagatggtacagtgaaatcaagaactataacttccagcagcctggcttcacctcggggactggacacttcacggccatggtatggaagaacaccaagaagatgggcgtggggaaggcgtccgcaagtgacgggtcctcctttgtggtggccagatacttcccagcggggaatgttgtcaatgagggcttcttcgaagaaaacgtcctgccgccgaagaagtaacttgttaaatgtaatgggaaggtggcagacttaagaacgtggatatgaagtgcctagaaccaccacaacctggctgtgcgtctgtccctgtgggtgtatgtgcttgtgtgtgtgatgcatgtgagcgtctctggcacacacacttggacatacagttctgtgtgcgctcattcttattacaggagtgagcaaaggaagcatttaccccgatggttacctagaccacgattatttggattggggggaggggggatccgttttttttttttaattttttgttatttctaagcaaacctcttttgtacttttcttacttctaatatccatccctggactttttgtattccaaatgtttgtgatgctgagaagtgaagttcattttatgtgatcttcatgcgtcgtaatctacttttggtagataattaagattattaaaccctcatttaaatgtgacataaaatacagctttaagcacataaatataaagcagcttccatcaggaacatggagcaggcagggactccattttacagaattactgagatttctcagttgtaaaacatgatgtcatcctgcatgcctcctggaattctccaatggggtcgccaaacaacaaatggagaaaaaaagttttacttccttgcattcttctacctttaaatagcaaagtaccactaccaccaccacctcttgcccccttccctcttttcttaaacttctggcatttcagagctcagcaggctacccctggtttctggagagttgggctaggcctgaagctccccctcccccacctctgctaggcagcccaggcctggtctgggagacagcccctcaccctgcctgggctcttggccaagcggccttggatggatgaagtcagagaggtggggtgagggtgagcttactcagggcccccagaggaagccctcagcctctgccctccccccacacagggcgggagcccaggcctgttcctggcagctgtggctgcagctgtgctcctgctccctcctggaatgtgcgacaagcccaaatgttccagggaggcggccggggcagggggcttagaagtgctaatatggttctgtgttttgcctgaaacgataccaggttcccctgaatagcaactttacaaggtccatgtgggagggaccaacccagatgccctgctgagtgtccctgaaaccatggcagctccatctgtcaagatggcaggggccggagtgagggggctgctggcttaacagcaggcatctgggcaggccagtcctcaaagcagctcctgaaggtctgtgttgcactgtcaccagtctcaagctatgcctctaatttcaccagggatattgactaagaagacaataaaatctttttctttgtgtaaaaaaaaaaaaaaaaaaa

SEQ ID NO: 585 - protein, 154 aa, Human
MGKSASKQFHNEVLKAHNEYRQKHGVPPLKLCKNLNREAQQYSEALASTRILKHSPESSRGQCGENLAWASYDQTGKEVADRWYSEIKNYNFQQPGFTSGTGHFTAMVWKNTKKMGVGKASASDGSSFVVARYFPAGNVVNEGFFEENVLPPKK

SEQ ID NO: 586 - DNA, 4454 bp, Human
tgcagtgtacttcgacaacttgggtgtaaagatgggaaaaactggaacagcaaccaagcaaccgacataatggaaacatcagggtggaagtccatgattcagtctcaccctcatttagtagcagaagcctttcgagcactagcatctgcacagtgtccacagtttggcattccacgcaaacggctaaaacagtcctgaaatcttccatgaacagttgaaaaatggaattgactttcactcctccaggtccagaaggattctaatacacaaaccataagcaagagttgtttctgttattttgtccacagaacagaagctgaaaaagcatattgcttgcatttcaggtggataatttatggtttattcttcagctttaaattagactgattaattcacttcaaggccttaaattatcttcaatgacttctcttgttcatataatactttaatttttttttattgtgccttgtcattttgaccaaggctatgcaggattgcactagctccataatgcagtaatattgataactgaggatactaagtttcaaaaggatcttccattattttgcaaaaagaaaaatgaattttatagggtttgtcctatgctatctcaaagtttaagttctctttaaaagcacttgtattggagattaccagtaatatctccaatctaagttctataaatatgggagaaccctcttaccttcaaggtaagttatggcaatacactgcttcaattctaatttatttttcatttcagggggcaaatatgcaatgagttggcctagatttttagtgacatttatgatgtttgtcttgtatgttaactgtccaacaaactgtgggtttattctaagtttacaattattgagaactgattgaggttaagatttcatgaagaaagcatgtattgtgtggaagtaatttttttttaatttatactgacctacatttatacgaagaattctgtacatgttaaaagtaaggatgaccaaatgcaaatttaatgagtgggccaattaagaaagatacatatgcacttttactgtgtaacttttgtatgctgaatggtacatatatttttttgcttttgagggaattaataaggtataattaattgtgtcttaacttttcaaagaaatttttagatggaggcaactgggatgtttgtgataatagatgagaaagacatccttgattgtagttaaattggtttggattacagatattcattattgaattgactcctattttctcacactttggaaaagacacctgaacaataaatgaatcctggatagtctactctccttcaaacaattaactgatacttgcctttgggagatgcatacaaaaggagagaacccttagactatgtcaggtcacactaggaacctcccctcactccccgtttttcttcattgtgtttcagttactgtactaacattgtggatgatactgaaattctgcataatgtgaacaggataaactatttataaactgcttttcatgggccagttctttattataaatgaattttagctttaaatgcatatacacgttcagtgtttgatagttgtgttcttaagggaggtttgttctggtgcattgtcctggagaagcagaagcagtcagtgttggggtaccacatctgacttactgtggtggtgaccagtgtgcttcttaagggcaagatttatatttgaccacaagggaaaaagtgtgtcactggaaaaaaacgcatatacctatgtttgcaaacataactattcttcagattaaaatttgtataatttgtttatttaatgtttgaattcaggacaaaagaaaaaatgaagcttgaggtgttttcaaatagaccttatttttgctatctctttgttaggtgttaactgaagcaattcgaatatgtccagattcatttggattcatatttacattgaaaaaactcaactaagcatttgttatccacaacaacctagagtttaaaaagatcgtattttcacctgtcttcattactttctatgtagtttcattctttgtcgtggtaacttaaatttgaaattggaagaatctcttgggatagaagaaagattcttacctggtgatggaacttcatacttcatcctgtgtaagagtattatgggaagtagaaattcacttccttaaatccatcgtaagattgagcctcaagtttgcaatatacaattttaaaaatacacatacatacatacatatgtatacatttccagttttaagattttgcgagggtcttataagaaaacaaaaattccctcaggctatagaattatgttgtcatatatcagaaaagtactgatgtatccatttatatccaatgcgcaccacaccggcacattgtgatttaattcaccgcttgaatctatatttctaaccacagtgacttcagtaaaaataccgtataatgaacatttcagcttcttcttacttactcgagagtttattgcaaatcttaaggattttattataaagatttttttttagtttggtagcacattttgtaccaaaaatgtcaaacactgtgctgtaagaatatccatgtttgtagaaatgtccacttttcagataatataatgcctaccattatactaacagaatcatatggtagttgatttatttttttatttattatgtatatttttggtattgtgggttcttgaggcaatgataaaaacacttaatgtattctgacatgagtgctctaatagcctccttctcctcatttttaaactgcatacattactttcaaaataggtatagatattctgtcccgccttttgagctattagcctgttcctgtttccctttgtcacctaagcaaggctttttctgagaaggtagtgaatggtttcaaatgttgcatactataagaataatcattgggtaactgttgtttagaccaacacttagaaatactatatttgtgccttttcatttttaattttaatgtgtgttgatatttggagcacaaataatgaaggtgccataatatggcttgccaatgttacctccttgaatagtcatgtgtcattgtcttgaattggtaattggagaaccttgcatgaaatatgtgatcgtgtgtgtgtgtgtgtatgcgcgtgtgtgtctgtgtgtttgtgtacatacctgtatttgcttggggcttgtgtgtggtatgttacaaagagtgaatttctggaaatagaaatcagttaaatgttgaaagttcaggttagcagaaatatttcatttaaatatgctttactttggaggacaattgattaacagaggaaatgataattttcaaaaatgtgatcaatttactgcatgatgaaatgtgaaaacagtgcctttttaggacatcaattataataaaattgttttaaaatattaacaaagatctcaaaaagttgtcatgaacattattcatttatttttaaactggatctaaataagagcttagatggccaaaattagaattaataatatacccatttaaattttgttcataaatttaaaatcttaatcagaattctttataaaatgtgggtcatagatatgacccagtgttactaaaatagaacaaggattgtgaaaatccagctcaacatacttaagtatacttggcttagagccaagtatacttgaagaggtgaattattctgacttggacatgcgtgctctttgatggataaaataaaaatattcaatttattcttacaaaagaaggtgggtgggtgagtgggttcgttttagtgttctcagattataaagacagctataaagacagcactttccgcacacaaagtgtattttacaaaccttttttatacaaattaatgagctctactttatttaagtgttcatggaatgatgtaaattttaggtccagttgaacaaatattgagtgcctatcatatgcaaggctaactccttactaggaatgaaatcacacagtgtcttctgtttgcagtatgtgaactttatgtttgaaaagaaattattatatttaaatttttttgttgtcagagtttatcattgtatactgtaacccagtaaattttgcattcagttttaaaaaatgaagatgtaacttacctgagtctcatttttgaaaatgaaattctgcaaaaattatttaaaaattagttcttggggaaattgattttcaagattcaagtgtataaaaacttatattgaacttttcagcctcgtttttaattagctgatgttaatgataagatacataatacatgtatcttgttgctgaaaatattttttgcatttcaacacattgagttaaaataaagttgttactacttattcaaaaaaaaaaaaaaaaaaaaaaaaaaaaaaaaaaaaaaaaaaaaaaaaaaaaaaaaaaaaaaaaaaaaaaaaaaaaaaaaaaaaaaaaaaaaaaaaaaaaaaaaaaaaaa

SEQ ID NO: 587 - DNA, 5385 bp, Human
gcaactgaagacggaggtgcccaaggtcagaaggaagcaccacacagagggcacaggcaggatggccgatgctgacaggaaccagcggtgactctggggcccctggcagcagctctgtctcctgaagatgaagtggcccaggtgaagcccaggccagccccaatggccagctcggagactgagatccgctgggctgagcctggcctggggaagggcccccagcggcggcgctgggcctgggccgaggacaagagggatgtggatagaagtagttcacaaagctgggaagaagagagactctttcccaatgccaccagccccgagctcctagaggacttccgcctggcccagcagcacctgccgcccctggagtgggacccacacccgcagcccgatgggcatcaggattccgagtcaggagagacttcgggagaagaggctgaagcagaggatgtggacagcccagcaagttcccatgagcctcttgcctggctcccccagcagggccgtcagctggacatgactgaagaggagccagatgggaccctcggaagtctggaggttgaggaggctggagagagctcctcaaggttggggtatgaggctggtctcagcttggaaggccatggaaacaccagccccatggctcttgggcatggtcaggccaggggctgggtggcttctggcgaacaagccagtggggacaaactttctgaacattccgaggtcaacccatccgttgaactcagcccggcaaggtcctggagcagtgggacagtgagcctcgaccaccctagtgacagccttgattctacctgggaaggagagaccgatggcccccagcccactgccctggcagaaaccttgccagagggccccagccaccacctcctaagcccagatggcagaactggaggcagtgttgctcgggcaacccccatggaattccaggactcctcagctcccccagcccagagtccgcagcatgccacagatagatggaggagagaaacgaccagattcttctgccctcagcccaaggaacacatctggaagcagacaaagacgtcacctaagccactcccttcccgattcattggctccatcagccccctgaatccccagcccaggccaacgcggcagggcaggccgctgcccagacagggagccactctggctggccgctcctcttctaatgcccccaagtatggccgggggcagttgaactacccactccctgatttctccaaggtagggccccgggtgagattccccaaagatgagagctaccgtccccccaagtccagaagccacaacaggaagcctcaggcccctgccaggcccctcatcttcaagtctccagctgagattgtgcaggaggtgctgttgagcagtggagaagcagccctggcaaaggacacgcctcctgcccaccctatcaccagggtaccccaagaatttcagacgcctgagcaagccactgagctggtccatcagctccaggaagactaccacaggctcctcaccaagtacgctgaggccgagaacaccattgaccagctacgcctcggggccaaggtgaacctgttctctgacccaccccagcccaaccacagcatccacacgggaatggtgccccaggggaccaaggtcttgtccttcaccatcccacagccccgctctgcagagtggtggccgggcccggccgaggacccccaggcctctgcggcctcagggtggccatcagctcgaggagacttgagcccctcctcgcttaccagcatgcccaccctggggtggcttccggagaaccgggacatctctgaggaccagtcctcagcagagcagacccaggcactggcttctcaggccagccagttcctggccaaggtggagtcctttgaaagactgatacaggcaggacgtctcatgccccaggaccaagtcaagggcttccagcggctgaaggctgcccacgcggccctagaggaggagtacctgaaggcttgtcgggagcaacaccctgcccagccgcttgccggctccaaggggacgcctggaagatttgatcctcgcagggagctggaggcagagatataccgtctgggaagctgcctggaagagctgaaggaacacatagaccagacccagcaagagcctgagccgcccgggtcagactcagctctggacagcaccccagccctgccctgcctccatcagccaacgcacctgcctgctccttctggacaagcccccatgccagccatcaagacctcctgccctgagcctgctaccaccactgccgccgccagcactggcccctgcccattgcacgtaaatgtggaggtgagctctggcaacagtgaggtggaggacaggccacaggaccccctggcccgactcaggcacaaggagctgcagatggagcaagtttaccatggcctcatggagcggtacctcagtgtgaagtctctcccagaagccatgagaatggaggaggaggaagaaggagaggaggaggaggaggaagaggggggaggtgactccctggaagttgatggggtggctgcaactccagggaaagcagaggccaccagggtcctcccaaggcagtgcccggtgcaggctgagaaaagtcatggggctcccctggaggaggccacggagaagatggtatctatgaagccaccaggtttccaggcatccctggctagagacgggcacatgtcaggcctgggcaaggctgaggcagcccctccaggccctggcgtgccaccccaccctccaggcaccaagtccgcagcatcccaccaaagtagtatgaccagcctggagggaagcggcatctctgagcgccttccacagaagcctttgcaccgaggcggtgggccccacctggaggagacctggatggcgtccccagagacagacagtggctttgtgggctcagaaacaagcagagtttcacccctcacccagactccagagcaccggctctcccacatcagcacagcaggaacattagcccagccctttgctgcatctgtgcccagggatggagcttcctaccccaaggccaggggttctctgattcccagaagagccacagagcccagcacaccccggagccaagcacagaggtacctctccagcccaagtgggcctctccggcagagggcacccaacttcagcctggagcggacactggcagccgagatggcggttcctggctcagagtttgaggggcacaaacggatttctgaacagccccttcccaacaagacaatcagcccacccccagcccccgcccctgccgctgcgcctctaccctgtggaccaacagagaccatccccagcttcctgctcaccagggcagggcgagaccaggccatctgtgagctgcaagaagaggtgtcccggcttcgtctgcggctggaagacagcctgcaccagccactccagggcagcccgacacgcccagcatctgcctttgaccgccccgcccggacccgcggccggccagcagactccccagccacctggggctcccattatggcagtaaatccacagagagattgcctggtgagcctagaggtgaagagcagattgtccctccaggaaggcagcgagccaggtcttcctcagtgcctcgggaggtgctccgactgtccctgagttcagaatctgagctgccctccctaccactgttctctgagaagagcaagaccaccaaggacagtccacaggcagctcgggatggaaagagaggggtgggcagtgctggatggccagacagggtcaccttccggggccaatacacaggccacgaataccatgttctgtcccctaaggcggtcccaaaaggcaatggcacagtctcctgtccccactgccggcccattaggacccaggatgcgggtggtgctgtcacaggggacccactgggaccgcctcccgctgatacccttcagtgtcccctgtgtggtcaagttgggtctcccccagaggcagatggtccaggctcagccacctctggggcagagaaggccaccacgaggagaaaagcaccttcaactcccagccccaagcagaggagcaagcaggcggggtcgtcgccacgcccaccccccggactgtggtatctggcaacagcgcccccagcaccagcccctccagcctttgcctacatctcctcggttcccatcatgccttatccacctgccgctgtgtactatgcgcctgcaggacctacctcagcccaaccagctgccaagtggccgcccacagcctctcccccaccagcccggagacaccggcactccatccagctcgacctgggcgacctagaggagctcaacaaggccctgagccgggccgtgcaggctgccgagagcgtccgctctaccaccaggcagatgagaagctcgctgtcagccgacctgcgccaggctcacagcctgcggggctcctgcctcttctgacttcactgggggcccagaggcagatgggtgggtgggtgggcaggtggcctgccaggccaggagtgggctggagctgctgaggcccagaaggcccgcatagttcctcaccaggagggtctccctccagcacaggtcccgcctgctcagtccctgtgctttccaagtggagggggtgtcagctcggtcaccaagagaagtgacttcccaggagcaccagtcccctcacagaggtgctgtgagcgaggcctccttcggtccaggcagaacctcaggcagtctctcctggtcctgcatgtgtgcaactccagctaataataggtattttatatacagatggacagatatttttttaaactggggagttttcctgatcttgggtcctctttagggggccagacaagaaaggcctacggtttctggagcaaacctgtcccccacctgtgaccagtcactctggggcaagcatcactgggaagggcatagccggagacctttctcctagtgactggtagtcagtggggcattttaggatgtcagggccccagggtgacatgtgtccagcttttctatggcagcagaggcctttccctcagacaagctacaaagtgcccaggatgccatccaccatggtccccttcagtacctcacgcatggtccccagcttctcctaggatcccagtggcatttatcagtggccagctacctgccaggcccgggctggggcacggtctgcggccatgaggccaggccgcctcccgcacccctaccccgtggcagcagcatacctctgcatttctggaatgtgtgtgcatcaatgatgtttgtatatttgaggcatttaaaaatctattttcgttacgagggcaaatgaagaatgaatattgatcttaaaaaaaaaaaaaa

SEQ ID NO: 588 - DNA, 6060 bp, Human
ctggggctgggaagggccctgtgtcctctggctttaaaatgggcaatgctattgaaaaacagaagcccttgaaacgaagtcatctgtacccctggaaacaagactctcagcgttctcatctctcttccttcaccatgaagctgatggacaaattccactcacccaaaatcaagagaacgccatcaaagaagggaaaaccagctgaggtgtccgtaaagattccagagaagcctgtgaacaaagaggcaacagacagatttctaccagagggctaccctctccccttggatctggagcagcaggcagtagaatttatgtccaccagtgctgtggcttccaggtctcaaaggcagaagaacctgagctggctggaggagaaagagaaggaagttgtcagtgccctgcgctactttaagaccattgtggacaaaatggcaattgataagaaggtactggagatgcttccagggtcagccagcaaggtgctggaggccatcttacccctggtgcagaacgatcctcgaattcagcacagctcagccctctcttcctgctatagccgagtgtaccaaagcctcgccaacctcattcgctggtctgaccaagtgatgctggaaggcgtgaactcagaagacaaggagatggtgacgactgtgaagggggtcatcaaggctgtgctggatggagtgaaggagctggtcaggctcaccatcgagaagcagggacgtccgtctccgacgagccccgtgaagcccagttcccctgccagcaagcctgatggcccagcagagctccccctgacagaccgcgaggtagagatcctaaacaagacgactgggatgtcacagtcaactgagctcctcccagatgccacggatgaagaggtcgcgccccccaagcctcctctgcctggcattcgggtggttgataatagtcctccaccagcattgccacccaagaaaagacagtcggcgccgtcccctacccgagtggctgtggtggcccccatgagccgagccaccagtggctccagtttgcctgttggaatcaataggcaggattttgatgttgactgttacgcacagaggcgactgtcaggaggcagccactcatatggtggagagtcgccccgcctctccccctgcagcagcataggcaagctcagcaagtcagacgagcagctgtcctctctggacagggacagtgggcagtgctcccggaacacaagctgtgaaacactagaccactatgatcccgactatgaattcctccagcaagacctctctaacgcagaccagatacctcagcagacggcctggaaccttagcccgttgccagagtctttgggggagtctgggtctccatttcttggccctcctttccagctgcctcttggcggccatccccagccagacggacctctggccccagggcagcagacagatacgccacctgctctccccgagaagaagcgcaggagcgcagcctcccagacggcggacggctctggctgcagggtgtcctacgagcggcatccctcgcagtatgacaacatctctggggaggacctgcagagcacagccccgatcccatccgtcccctacgcgccctttgctgctattctgccctttcagcatggaggttcctcagcccctgtcgaatttgtgggtgattttactgctcctgagtcaaccggtgacccagaaaaaccacctcctctaccagagaagaaaaacaaacacatgctggcctacatgcagttgctggaggactactcggagccgcagccctctatgttctaccagacgccacagaacgagcacatctaccagcagaagaacaagctcctcatggaggtatacggcttcagcgactccttcagtggggtggactccgtgcaggagctggccccgccgcccgccctaccccccaagcagcggcagctggagccaccggctgggaaagacggacatcccagagatccctcagcggtcagcggcgtccctgggaaggacagcagagacggcagtgagagggccccaaagtcaccagatgctctggagtcggctcagtcggaggaggaagtggacgagctgtccctcattgaccacaacgaaattatgtccaggctgacgctcaagcaggagggtgatgacgggccggacgtccgcggaggatctggggacatcttactggtccatgctactgagactgacaggaaagatttggtgttgtactgcgaggcattcctgaccacctacaggaccttcatctccccagaggagctcatcaagaagctgcagtacagatatgagaaattctctccctttgccgacacattcaagaagcgcgtcagcaagaacacgttcttcgtgctggtacgggtggtggatgagctctgcctggtggagttgacagaagagatcctgaagctgctgatggaactggtcttccgcctggtgtgcaatggggagctgagcctggcccgtgtgctccggaagaacatcctggacaaggtggaccagaagaagctactcaggtgtgccacctccagccagcccctggcagcccggggggtagcagccaggccggggaccttgcacgactttcacagccatgagatagcggagcagctaacgctgctggatgctgagctcttctataaaatagagattcctgaggttttgctttgggcaaaagagcagaatgaggagaagagccccaacttgacccagttcacggagcacttcaacaacatgtcctactgggtccggtccataatcatgttacaggaaaaggcccaggacagggaacggctgctcttgaagttcatcaagatcatgaagcacttgcggaagctgaataacttcaactcctacttggccatcctctctgccctggactcggcgcccatccgcaggctggagtggcagaagcagacttcagagggcctggccgagtactgcacactgatcgacagctcgtcctccttccgagcctaccgggccgccctctcggaggtggaaccgccgtgcatcccgtacctggggctgatcctgcaggacctgaccttcgttcacctgggaaacccagactacatcgacgggaaagtgaacttctccaagcggtggcagcagttcaacatcctcgacagcatgcgctgcttccagcaggcgcactatgacatgcggaggaacgacgacattataaacttcttcaatgacttcagtgaccacctggctgaggaggccctatgggaactgtctctgaaaattaaacccaggaacataacaaggagaaaaacagaccgggaagagaagacctaggagcagacgccgggatccaggagaatgctcgaggggcgcagagggcagctcccagaccggagaggaccttggacctgttaggcgcatggcaggagtcccggcctcggagccatgaggctggccagccctcagcggggccgggcgggagctggagcctgccagccgcttcctgcctccttcctctgtgggagcagacccgtgggcctcagggcagccagcaggcaggtcttgttgccaatttacaaaccggtggttttctggtttggttttgttttctgcttttacttccatctctcccctcttgaccttccacccactcccctccagggagagagcagcagagacctcatcagcagaccaaggaagtggtgggtgctccccctccctaagctccagggtccctgaatcttctgaaatctcaaatgagtggaggcctcctggggtggcctgtcctgcaggggccctggaatgggggcaagcagctgggtgggcagaatgcagagtagactcgggggaggatcctttcactttccgcttccccttctgatgcatggaggatggtgtgagcttttcagcaggcccggaaaggtacgcaggtgacgccttagcagccccgcagctggtgctctgccccgcggtactggcgccatcagggcctcccttgcccgcctgagagcagcagcagtctctgtcatcccgtcgccccttaccccccaccccaggccactgggcccctcccacaccacctggggagctgagaagaggaggctggagtaagggaggacttgatcatccaagaaatactttttattgctgggagtcttctgaacctcaccaaactgaggccagagctgagctcctgggggagttaattcagaggggagaggccagcacctccctcctccattgctcgctgtgtgccttaaactccatctcatgtccctccccatcccctggctttccctccctccttgccccatcctgggccagccagcagggctcctcctctggctcttcagacctttcagccagtgctgtcagtgcccctgggagggaagggcatccctgaggcacccgaatggtccctcagggtgcagggaggcagaagcctggccacagaggagcctcctaaggcagcagctgcagcaagcgcaccctctccccactctccccacgccagagcggcttccagagcagatgctgtttccatcctcctcgtcaaaaccattctcgctgctgagcttgacaatctgggcaaggcttgtggggcgcttgacaaacagaatctgccctgtgccgcctggttccgtggcctccagcatgagcctgcaggcagggcgctgcgggaacccagttgtgctgccccagcccatgcctccgggtctgctgtgcatgaatgagtgctcacttgtcccgggtttaggacgtggtcaagtgaacagcagggtctaactgtgcttacttagcccagttcaaacagaacaaaggaaaaatatagaaagcaacatctgttgatcatttaggtttttttttaaaccaccatgtcactttgagtccttcatgggtttttgaacagcatttatcaagaagaaaatgtgggctttttcccctctcccgtgttttgtttgtcctgtagatagagggaggaaagccgtgcagtggcaggcgggaccccctctggtggcgggaccccctcttgcggtggtcttgcggggccagccgggacctgtcactttattatttaaggagtgtgtgtgtagagtcgctggcttattaacagtattgtgtgtgggttgggtttttagtttgttccttctttttgaagtcccttcatttcaatccttgactctctctccccttcccttgcccagctctgttgaatgctgctgtgcgcgtgtgagggccgctctgcacacagggcccttgggttgtgtgaactgaaattctccctgtatttgtgagactcgcaggagtccccatctgtagcacaggcaatgccagtgccatgctgcagcctcagaaaccaggcctctcactccagcagcaggcagaaccgtgtctgtggtcgggtgctgtccacagctctgtctgccttgttcttgggcttgagctggatagaggtggggtctcttcaccttccctgaattcagaacagaccctgtgcctggccccagtgtgcccaggcaattccccaggccctcattgggagcccttggtgttctgagcagcagggcccaggcagcacatgagcagtgcccaggggctccctgcgtgaggacggcaaggtgcgatgtatgtctaacttattgatggcaggcagccccctgtgccccctaagcctggccctggttattgctgagctctgtgctcagtgctgcggcctggccgtggctcgtctgttcctttggggggcccgggcgggttgtgggaatcagtcttcacagacagacgtgagccaggcggaggactcgttccttgcagaggtcagtcctcacctgcaggtgtcggggtgggggggggcaaggaggggcaggcacacaccatgtctgacctgaacccgattctggggagcatcttcccgctccggccccacgacctccacagggttacattgtaatatatatgccccagctaacctgtctgatggtggcatcttcctgcagacatttcaaacatgtaacttttatatgaaaaaaaataaacacagatgaaagctgccaaaaaaaaaaaaaaa

SEQ ID NO: 589 - DNA, 2755 bp, Human
gtgttgctcctcccctggcagccgtgaggggggttagatctcagccggagccggagctgggcctagctgtcccacgggccaccactacctcctttggttcgggagaaagctacgaccaagtacgcccagctcgggccttagaacttctgaacgggcagtgcgggtaggccctgcttagcccttcccggaggacacctgaccaaaagaggaagatagtcttgggacccttgcatggtgtttcaaagggtggtgaagaactaaggtagaagaatacatgttcacttccagtgaacaagagcatgttcccaaactcaattttgggtcacccacccttcactccaaatcatcaacaacataataacttctttaccctgtcacctactgtttattcacaccagcagcttatagatgcacaattcaactttcagaatgcagacttgtctagagctgtgtcattacagcagctgacatatggaaatgtcagtccaatacagacctcagcttccccattatttcgaggaaggaagagattaagcgatgaaaaaaaccttcctcttgacggtaaacggcaacgtttccattcaccccaccaagagccaactgtagttaaccagatagtgcctttatcaggtgaacgaagatactcaatgccaccattgtttcatacacattatgtaccagatatagtcagatgtgttccaccttttcgagaaattgcatttttagaacctagagaaatcacactgcctgaggccaaagataagttgagtcagcagatactggagttatttgaaacatgtcagcagcaaataagtgatttaaagaagaaagaactctgtcgaacacagctgcagagagaaattcagctgttatttccacaaagcagactttttttggttgggtcctctttaaatggatttggtacccggagcagtgatggtgatttatgcctagttgttaaggaagaaccatgtttttttcaggtaaatcagaagactgaagcacggcatatactcaccttagtccataaacacttctgtactagactttcgggctacattgagagacctcagctgattcgagcaaaagtgccaattgtgaagttcagggataaagtcagttgtgtggagtttgacttgaatgtaaacaatattgttggaataagaaacacattccttctcagaacttatgcataccttgaaaatcgagttcgtccgttagtgctggtgattaagaagtgggcaagtcaccatcagataaatgatgccagtcgtggtactttaagcagctatagtcttgtattgatggttttgcactatttacaaaccctacctgaacccatccttccatccctccaaaaaatttacccagagtcttttagtcctgctatacagctgcaccttgtacatcaagctccatgtaatgttcctccttacctctcaaagaatgaatcaaaccttggggacctcttactgggctttcttaaatattatgctacagaatttgactggaatagtcaaatgatttcagttcgtgaagccaaagccattccaaggcctgatggtattgaatggagaaataaatacatctgtgtagaagaaccttttgatggaacaaatacagccagagcagtgcacgaaaagcagaaatttgatatgatcaaggatcaatttttaaagtcatggcacagattgaaaaacaagagagatttgaacagtatactacctgtaagagctgctgtcctgaaaagataactggcctctatttcttaataaattcttccaagaaataaagaacaatagtttcatcataatacattatgtttacctccatcatagttgcttttttcatagttcttgttttcatgttttatttttaaaaagacatataaagattgcatattttattatgacatttcctaataaacccctttgatttaaaaatgtatttttaaaaatgtttacattgatgatgagtaatattgcatgtgttttcaggtgatcagataaaatatattttgggaaattaacaaataaaaagtttttgatataacttcaattaattgtaccacatgctaatcctgaagagatgtgtagaattttggaaagggtctaattcatacatgcttaaagtataacctacgttagatagtttgttgtcaaagtctgttctagtaaagtgaagattcaagtcagttgttcatttacttgaagcaaaacgaaatctttcatttcagtcaaatcactgcagtcatgaaatactgaacaattgccttaagtctttgcttgactcactgggatagactgaggctttgggtgtgtctgtattagcatttcattagtacttcacatgcttttgatgtactcttgagattgctttaaattttgtattgaaacaacaatacattttgcactgtagtaatgggagcactaactcttacaacagttagtgaatcgttttaaagaatcagttcagtgtagacattttgaaaagattgtttcctgtgctttacgatagcttagtgcaatgtgcacttctgttttacttgccattttcctgctctgttttctctgtgacatgaagcaacagaaactgagatcaaagttaagattatatcctgtttgtagtatcagatatttttctgtgtacaattataggattgtaatctaaactggaatttttaggcagtaagtcaccacaaaatgttttagataagacacaataaaattattataaataaaagcttaatgtttgt

SEQ ID NO: 590 - DNA, 3706 bp, Human
gcgactgcgggcggcgcggcgcaggggcagccagcgaggagcggcggcagaggaaaggccaggcaggcgccgcctgcggagagcaccgggcggccgggcctgcgtggtgccgcgcgcggcggcggcgacgacgacttcctccgggccgggcgggacagcgcagggccatggccgaggcggtcgcggctccgatttctccgtggacgatggcagccacgattcaggccatggagaggaagattgaatcgcaggctgctcgcctgctttccctagaaggtcgaaccgggatggccgagaagaagctggctgattgcgagaagacagccgtggagttcgggaaccagctggagggcaagtgggccgtgctggggaccctgctgcaggagtacgggctgctgcagaggcggctggagaacgtggagaacctgctgcgcaacaggaacttctggatcctgcggctgcccccgggcagcaagggggagtcccctaaggagtggggcaagctggaggactggcagaaggagctctacaagcacgtgatgaggggcaactacgagacgctggtctccctggactacgccatctccaagcccgaggtcctctcccagattgaacaagggaaggagccctgcaactggcgccgccctggccccaagattccagatgttcctgtggaccccagtccaggctcggggcccccagttcccgccccagacctcttgatgcagatcaagcaggagggtgagctccagctccaggagcagcaggccctgggcgtggaggcgtgggcagccgggcagccagatattggggaggagccctggggcctcagccagctggattccggagcaggagacatctccacggatgccacctctggtgtccattccaacttttccaccaccatcccgcccacctcctggcaaacggatctccctccccaccatccctcttcagcatgctcggacgggaccctgaagctcaacacagcagcctccacggaagatgtaaaaattgtaataaaaacagaagtccaggaagaggaggtggtggccacacccgtacatcctactgacctagaggctcacgggaccctgtttggaccaggccaagccacacggttcttccctagtcctgcccaggaaggagcctgggaaagccagggcagctccttccccagccaggaccctgtgctggggctgcgagagcccgcccggcctgagagggacatgggtgagctcagtcctgctgtggcccaggaggagacccctcctggggactggctcttcggaggggtccggtggggctggaatttccggtgtaaaccgccagtgggcctgaacccgaggacggggcccgaggggcttccttactcctccccggacaacggagaggccatcttggaccccagccaggccccaaggccattcaacgaaccctgtaaataccctggccggaccaaaggctttggccacaagccagggctgaagaagcaccccgcggcgccccccgggggccggcccttcacctgcgccacgtgtgggaagagcttccagctgcaagtcagcctgagcgcgcaccagcgcagctgtggggcgcccgacgggtcgggcccgggcacaggcggtggcggcagcggcagtggcggcggcggtggcggcagcggtgggggcagcgcacgggatggcagcgcccttcggtgtggggagtgcggccgttgcttcacgcgccccgcgcacctcatccgccatcgcatgctgcacaccggcgagcggcccttcccctgcaccgagtgtgagaagcgcttcaccgaacgctccaagctcatcgaccactaccgaacgcacacgggcgtgcggcccttcacctgcaccgtctgcggcaaaagcttcatccgcaaggaccacctccgcaagcaccagcgcaaccatgcagcgggcgccaagaccccggcccgaggccagccactcccgacgccgcccgcacctcctgatcccttcaagagccccgcctccaaaggacctttggcctccacagaccttgtgaccgactggacttgtggcctcagcgtcctgggacccaccgatggcggggacatgtgagcgcctccagccccatagcccctgccggccgcacgtgtaaaaagccccgtgtgcaggcagcagggcggcgtggaagcttcaggcagacgcgggacggggagaaccaaatgtccaagttgctgaactgatgatcactggagaaagagaaactatccaccaggacagctgccacctctaaaccaagtagaattctctgtgaaatgggagcgccgtagaattttaagtaatttaattgcaaacctgttttgttttttgttttttgtttttttttaattcttgaggaaaaagctggaaaatagtaatagggctatttaaattttgtaggtacttttggttttcagggcgtgcatttctgtcactatctcactgagtctgatagtgtgttggaaggttggccagttggggacccctggcccactgactcctggggatggggtcctgtgtgtgcccctgctctgcccagttgggctgagtgggcctagcgcaccaagcccctgggcagtgagggccattgggtcccttggagcacacctcagtgcagcaggaaggacccctccgggagtagcggttgcatttcccagcttgcctctcctgaaaaggccccccaaaagtgctggccccaacttttctctattttgggccatctgtggtacccgtcccaagggcacttggtggtgtcccctagtgtgtgactccctggcctcataaggacgagttgtctgaaatcccagcgttaggtctggggagatggagaagctgaaactggggagctgcaccacaaacgtctagctctcagcagagctgggagcaaagcctggccgcccaccccaacctggggctgcctcccactccgtgagatgcttctgtctcctgttcactttgtgtggtagtttcttattttcaaaatgcatctcatttgatcattactgtgaccttgggaagcagcaggacagggatttctttttagaggtgcaaactgctcagaggggacacacctcagcctctcactgtgggtacacgtggcgtgccatgagtggggaagagcaacaggcgagatgcctcattctactggaacatcactgtgggtgaacagagatttccaggttttccctcttaaaatatttgtcccacaccgacaagagtccagtcaccaggcctcaaaggaacttctgcttgtagcagccgcctcccctgtgccccagcctccttaatgtgtgcactctcagagggcacagctcgcgaggctgggtttgggggccaagtggcttgttcattccagcatctaacatcataaaggtgggcccagatttcttgattcgaccacagtgctgttcctaccacacaaatatccattcctgttttgttgaagcagccactggtcctcttgtttcccctgcagacggagggacctggcagtgcccattcattcagccccctcatgcatacttttattaggcgatagactagttaagaaaattgtttctatgtactgtatattttgtacctgtttacacttctaatattgatataactgatattttgaaaaataagagaaaacatcctgttaaaataaaacctaaccagcaccaaaaaaaaaaaaaaaa

SEQ ID NO: 591 - DNA, 1941 bp, Human
cgggatggagcccgatcccgagcccgcggccgtggaggttcccgcggggcgcgtgctcagcgcccgggagctcttcgccgcccgctcgcggtcgcagaagctgccccagcgctcgcatggccccaaggactttctgcccgacggctcggcagctcaggccgagcggctgcgccggtgccgggaagagctctggcagctgctggcagagcagcgcgtggagcgcctgggcagcttggtggctgccgagtggaggccagaagagggcttcgtggagttgaagtctcccgcgggcaaattctggcagaccatgggcttctcagagcagggccggcagcgccttcacccggaagaggccttgtatcttctggagtgtggctccatccacctcttccaccaagacctgccactgtctatccaggaagcttaccagctgctgctgaccgaccacactgtgaccttcctgcagtaccaggtcttcagccacctgaagaggttgggttatgtggttcgacgattccaaccaagctctgtcctgtccccgtatgagaggcagcttaacctggatgccagcgtgcagcacttggaggatggagatggcaagagaaagaggagcagctccagccctcggtccattaataagaaggccaaggccctggacaactccctgcaacccaagagtctggcagcctccagcccacctccctgcagccagcccagccaatgcccagaggagaaaccccaggagtcaagccccatgaagggcccagggggcccctttcagcttctggggtccctgggccccagccctggcccggccagggagggggtggggtgcagctgggagagtggcagagccgagaacggagtcacgggagccggtaagcggcgctggaacttcgagcagatctccttccccaacatggcttcagacagccgccacacccttctgcgcgccccagccccagagctgctcccggccaacgtggctgggcgggagacagacgctgagtcctggtgccagaagctgaaccagcgcaaggagaacctctccaggcgggaacgggagcaccacgcggaggccgcgcagttccaggaagatgtcaacgccgatcccgaggtgcagcgctgctccagctggcgggagtacaaggagctgctgcagcggcggcaggtgcagaggagccagcgccgggcccctcacctgtggggccagcccgtcaccccgctgctgagtcctggccaggccagctccccagccgtggtccttcagcatatctctgtgctgcagacaacacaccttcctgatggaggtgtccggctgttggagaagtctgggggcttggaaatcatctttgatgtttaccaggccgacgctgtggccacattccgaaagaataaccctggcaaaccctatgcccggatgtgcattagtggatttgatgagcctgtcccagacctctgcagcctcaagcggttgtcttaccagagtggggatgtccctctgatctttgccctggtggatcatggtgacatctccttctacagcttcagggacttcacgttgccccaggatgtggggcactgacctcacagctctgcagaggatggagcttgctccgggggaccgggactgtctgttctcagggaccatctcggctgcctcctgtacccagactctaacctgtagcttcagaggccagtctgggccttggccctgggtgtctgatactcacagagtgaaactgtgaccctctcccttccctgctgccttgcagtgacccctctggaactcaggactcgattttaaggacccaggaggtggggcagaagagaggactgtgtgcctttaacgagagggtgcctgcttcgtgctataaagccaaagccattaaaaatagatttcttttctgctaaaaaaaaaaaaaaaaaaaaaaaaaaaaa

SEQ ID NO: 592 - DNA, 2182 bp, Human
gtcgacctcaccaggcccagctcatgcttctttgcagcctctccaggcccagctcctgcatcttggtggcccctccaggcccagcctctgcctcccgtcagcctctacagtcccaacgtctgcctcacagcagattcttcacgcccagcatctacctcactgtggaccccccaagccaagctcccaacctttcagcagcttctacacacccagctcccgcctgccagtggcctcttcaggcccatggggctcattcctgacaacggcctttccaggcccagtttttcccttccggcggcctctccgggcccagaacctcctcaagtcagcctctccagacccacttgcaccctccgggcgttctctccgggcccagctcttcttcctggttgggtctccaggcccgattcctgcctctcaacaacctctttggactcagtgcctacccatctcctggcggccttggtcggcccacagcttcctcaagccaagctccccaggcccaggtcaggcctcacggtggcctctccaggatgagctcctgccctccgatggcatctccaggccccaaatggtctccggtcggtgggctcctccacgccaaggttgggcctcccggcgactgccgcaggcccaagttgtcctgaagtcgggctctcccggccctgcctcccagcaagtaagcaagctcttttggctcaactcctgcccagctcccaaccgcctttgtaggccccgaactttctccagccaagctctgagggcccacctcctgcctcctggtggcctgtacagttctagcactggttggagaacagcctctgcaggccccgcccttgcctcccaggggcctctccaggcccagctcttgcccccacggcggcctcccggggccaggtccctgctgggaggtaggcggggacttgggcctgggaggtcgcggtggggcgagagctgggcctggagactcccctgggaggcaacagcggggtctgcagacgcccttctccagccggagctgggactgttcagtcactgggagaagggatgtgggtctgaagagcttggttgcagaaacttcggggtctacaaacgcaggcgggagctgagccaaaagagcttgtttgctgggaggtgggagatgcagccaggaggaacagctgggcaatgcgggaggcagaggccaggcctcctcaagttggcctctcagacccacttgcagcctcccggcgccccctccgggcccagctcttcctcccggctgcatctccaggccggactctggcccgactccaggtcccaacaacgtctttggactcagctcctgcccagctcccagcggccctggtaggcccacaacttccctaagccaagctccccaggcccagctcaggcctcgcggtggcctctccaggctcagctcctggccctccgatgacatctgcaggccccaaatggcctccggtcggtgggctcctctaggcccagcttgggcctcccggcggcctccgcaggcccaaatcgtcccgaagtcagtctctccaggcttagctccagcctcccggcggcctctgcaggcccaagtcgtcctcaagtcggcctggaagtgggcctggaagagcagcaagtcggcctccctgggcccagctccgtcctctcgacggcctctccaggtgcaaaacttcctcgagtcagcctctccaggcccagctcctcctgcctcccagtggcctctttcagcccagcccagctcatggctctcggcggccttcgcaggccctgcttttgacttttggcagcctcttcaggcgcagaacttgatctccagtcggcctttgcaggcccggcctcctgcctctcgaaggcctgcacgggcccggcctcggcctcggcctcacagcggactctccacgcccagctagctctcgcctcactgcggcctccccagtccaaagctcctgcctttcggccacttcggcaggtccagctcctgcctgccagtggcctctttaggcccagctcattcctcacgtcggccattccaggccccgtttttcccttccggcagcctcttggcctctaatttgtttatcttttgtgtataaatcccaaaatattgaattttggaatctttccaccattatgtaaaaaaaaaaaaaaaaaaaaaaaaaaaaaaaaaaag

SEQ ID NO: 593 - DNA, 10259 bp, Human
ccgagccgggagccgagcgcgctgggcgcggccgtcccgctgccgccgccaagcccggagtgcgccagcggccatggttcccgcggcggcgccgggcgcctgagccccgggacgcaagcgctggaggcgggctgccggctgtgcgggcgctccggagagaccgacagaaggtgagcactgtgggctatgggatggatgaggtggagcaggaccagcatgaggcccgactcaaggagctgtttgacagttttgacacgacgggcacagggtccctggggcaggaggaactcaccgacctttgccacatgttgagcttggaggaggtggccccagtgctgcagcagacattacttcaggacaacctcttgggcagggtacattttgaccaatttaaagaagcattaatactcatcttgtccagaactctgtcaaatgaagaacactttcaagaaccagactgctcactagaagctcagcccaaatatgttagaggtgggaagcgttacggacgaaggtccttgcccgagttccaagagtccgtggaggagtttcctgaagtgacggtgattgagccactggatgaagaagcgcggccttcacacatcccagccggtgactgcagtgagcactggaagacgcaacgcagtgaggagtatgaagcggaaggccagttaaggttttggaacccagatgacttgaatgcttcacagagtggatcttcccctccccaagactggatagaagagaaactgcaagaagtttgtgaagatttggggatcacccgtgatggtcacctgaaccggaagaagctggtctccatctgtgagcagtatggtttacagaatgtggatggagagatgctcgaggaagtattccataatcttgatcctgacggtacaatgagtgtagaagattttttctatggtttgtttaaaaatggaaaatctcttacaccatcagcatctactccatatagacaactaaaaaggcacctttccatgcagtctttcgatgagagtggacgacgtaccacaacctcatcagcaatgacaagtaccattggctttcgggtcttctcctgcctggatgatgggatgggccatgcatctgtggagagaatactggacacctggcaggaagagggcattgagaacagccaggagatcctgaaggccttggatttcagcctcgatggaaacatcaatttgacagaattaacactggcccttgaaaatgaacttttggttaccaagaacagcattcaccaggcggctctggccagctttaaggctgaaatccggcatttgttggaacgagttgatcaggtggtcagagaaaaagagaagctacggtcagatctggacaaggccgagaagctcaagtctttaatggcctcggaggtggatgatcaccatgcggccatagagcggcggaatgagtacaacctcaggaaactggatgaagagtacaaggagcgaatagcagccttaaaaaatgaactccgaaaagagagagagcagatcctgcagcaggcaggcaagcagcgtttagaacttgaacaggaaattgaaaaggcaaaaacagaagagaactatatccgggaccgccttgccctctctttaaaggaaaacagtcgtctggaaaatgagcttctagaaaatgcagagaatgtgttagcagaaaagtttggtgacctcgatcctagcagtgctgagttcttcctgcaagaagagagactgacacagatgagaaatgaatatgagcggcagtgcagggtactacaagaccaagtagatgaactccagtctgagctggaagaatatcgtgcacaaggcagagtgctcaggcttccgttgaagaactcaccgtcagaagaagttgaggctaacagcggtggcattgagcccgaacacgggctcggttctgaagaatgcaatccattgaatatgagcattgaggcagagctggtcattgaacagatgaaagaacaacatcacagggacatatgttgcctcagactggagctcgaagataaagtgcgccattatgaaaagcagctggacgaaaccgtggtcagctgcaagaaggcacaggagaacatgaagcaaaggcatgagaacgaaacgcacaccttagaaaaacaaataagtgaccttaaaaatgaaattgctgaacttcaggggcaagcagcagtgctcaaggaggcacatcatgaggccacttgcaggcatgaggaggagaaaaaacaactgcaagtgaagcttgaggaggaaaagactcacctgcaggagaagctgaggctgcaacatgagatggagctcaaggctagactgacacaggctcaagcaagctttgagcgggagagggaaggccttcagagtagcgcctggacagaagagaaggtgagaggcttgactcaggaactagagcagtttcaccaggagcagctgacaagcctggtggagaaacacactcttgagaaagaggagttaagaaaagagctcttggaaaagcaccaaagggagcttcaggagggaagggaaaaaatggaaacagagtgtaatagaagaacctctcaaatagaagcccagtttcagtctgattgtcagaaagtcactgagaggtgtgaaagcgctctgcaaagcctggaggggcgctaccgccaagagctgaaggacctccaggaacagcagcgtgaggagaaatcccagtgggaatttgagaaggacgagctcacccaggagtgtgcggaagcccaggagctgctgaaagagactcttaagagagagaaaacaacttctctggtcctgacccaggagagagagatgctggagaaaacatacaaagaacatttgaacagcatggtcgtcgagagacagcagctactccaagacctggaagacctaagaaatgtatctgaaacccagcaaagcctgctgtctgaccagatacttgagctgaagagcagtcacaaaagggaactgagggagcgtgaggaggtcctgtgccaggcaggggcttcggagcagctggccagccagcggctggaaagactagaaatggaacatgaccaggaaaggcaggaaatgatgtccaagcttctagccatggagaacattcacaaagcgacctgtgagacagcagatcgagaaagagccgagatgagcacagaaatctccagacttcagagtaaaataaaggaaatgcagcaggcaacatctcctctctcaatgcttcagagtggttgccaggtgataggagaggaggaggtggaaggagatggagccctgtccctgcttcagcaaggggagcagctgttggaagaaaatggggacgtcctcttaagcctgcagagagctcatgaacaggcagtgaaggaaaatgtgaaaatggctactgaaatttctagattgcaacagaggctacaaaagttagagccagggttagtaatgtcttcttgtttggatgagccagctactgagttttttggaaatactgcggaacaaacagagccgtttttacagcaaaaccgaacgaagcaagtagaaggtgtgaccaggcggcatgtcctaagtgacctggaagatgatgaggtccgggacctgggaagtacagggacgagctctgttcagagacaggaagtcaaaatagaggagtctgaagcttcagtagagggtttttctgagcttgaaaacagtgaagagaccaggactgaatcctgggagctgaagaatcagattagtcagcttcaggaacagctaatgatgttatgtgcggactgtgatcgagcttctgaaaagaaacaggacctactttttgatgtttctgtgctaaaaaagaaactgaagatgcttgagagaatccctgaggcttctcccaaatataagctgttgtatgaagatgtgagccgagaaaatgactgccttcaggaagagctgagaatgatggagacacgctacgatgaggcactagaaaataacaaagaactcactgcagaggttttcaggttgcaggatgagctgaagaaaatggaggaagtcactgaaacattcctcagcctggaaaagagttacgatgaggtcaaaatagaaaatgaggagctgaatgttctggttttgagacttcaaggcaagattgagaagcttcaggaaagcgtggtccagcggtgtgactgctgcttatgggaagccagtttagagaacctggaaatcgaacctgatggaaatatactccagctcaatcagacactggaagagtgtgtgcccagggttaggagtgtacatcatgtcatagaggaatgtaagcaagaaaaccagtaccttgaggggaacacacagctcttggaaaaagtaaaagcacatgaaattgcctggttacatggaacaattcagacacatcaagaaaggccaagagtacagaatcaagttatactggaggaaaacactactctcctaggctttcaagacaaacattttcagcatcaggccaccatagcagagttagaactggagaaaacaaagttacaggagctgactaggaagttgaaggagagagtcactattttagttaagcaaaaagatgtactttctcacggagaaaaggaggaagagctgaaggcaatgatgcatgacttgcagatcacgtgcagtgagatgcagcaaaaagttgaacttctgagatatgaatctgaaaagcttcaacaggaaaattctattttgagaaatgaaattactactttaaatgaagaagatagcatttctaacctgaaattagggacattaaatggatctcaggaagaaatgtggcaaaaaacggaaactgtaaaacaagaaaatgctgcagttcagaagatggttgaaaatttaaagaaacagatttcagaattaaaaatcaaaaaccaacaattggatttggaaaatacagaacttagccaaaagaactctcaaaaccaggaaaaactgcaagaacttaatcaacgtctaacagaaatgctatgccagaaggaaaaagagccaggaaacagtgcattggaggaacgggaacaagagaagtttaatctgaaagaagaactggaacgttgtaaagtgcagtcctccactttagtgtcttctctggaggcggagctctctgaagttaaaatacagacccatattgtgcaacaggaaaaccaccttctcaaagatgaactggagaaaatgaaacagctgcacagatgtcccgatctctctgacttccagcaaaaaatctctagtgttctaagctacaacgaaaaactgctgaaagaaaaggaagctctgagtgaggaattaaatagctgtgtcgataagttggcaaaatcaagtcttttagagcatagaattgcgacgatgaagcaggaacagaaatcctgggaacatcagagtgcgagcttaaagtcacagctggtggcttctcaggaaaaggttcagaatttagaagacaccgtgcagaatgtaaacctgcaaatgtcccggatgaaatctgacctacgagtgactcagcaggaaaaggaggctttaaaacaagaagtgatgtctttacataagcaacttcagaatgctggtggcaagagctgggccccagagatagctactcatccatcagggctccataaccagcagaaaaggctgtcctgggacaagttggatcatctgatgaatgaggaacagcagctgctttggcaagagaatgagaggctccagaccatggtacagaacaccaaagccgaactcacgcactcccgggagaaggtccgtcagttggaatccaatcttcttcccaagcaccaaaaacatctaaacccatcaggtaccatgaatcccacagagcaagaaaaattgagcttaaagagagagtgtgatcagtttcagaaagaacaatctcctgctaacaggaaggtcagtcagatgaattcccttgaacaagaattagaaacaattcatttggaaaatgaaggcctgaaaaagaaacaagtaaaactggatgagcagctcatggagatgcagcacctgaggtccactgcgacgcctagcccgtcccctcatgcttgggatttgcagctgctccagcagcaagcctgtccgatggtgcccagggagcagtttctgcagcttcaacgccagctgctgcaggcagaaaggataaaccagcacctgcaggaggaacttgaaaacaggacctccgaaaccaacacaccacagggaaaccaggaacaactggtaactgtcatggaggaacgaatgatagaagttgaacagaaactgaaactagtgaaaaggcttcttcaagagaaagtgaatcagctcaaagaacaactctgcaagaacactaaggcagacgcaatggtgaaggacttgtatgttgaaaatgcccagttgttgaaagctctggaagtgactgaacagcgacagaaaacagcagagaagaaaaattacctcctggaggagaagattgccagcctcagtaatatagttaggaatctgacaccagcgccattgacttctacacctcctttgaggtcatagccaaaccaaagggtacactcatatttgtgcactttactgaaatagatgaacatttcagtaggttctcaacttaaaattaagcctaacctaaaactgccagcaacacaactggagtttccatttatcataattagtttttctaaatagacccttatgggagtttgaaaataaatactcacatatttcactacttaaattattcccaagatttgaatttattttaaaattttaatagccaccaagaatgtggacatatgaaaattcaagaacctaaaaaataccagttttgaatgagtttttgtggttttggttttttttttaattattacaaatctatgtgtaaaatctagatatttgaagtttgagatctgatgagaatggttgttataaactttattttaaaaccaaatttaggtgttcttacatatttaaatactggaaagtcattataatagttttggttctttgaattggtagacaattagtagagtataattggttaggaggcagggcttattaagtggttattaaccgctgacatcagacaaacccaaatctgtagaattctaaccttctaacacctgtgacagtattaccactcttcttgtattatagatttagaactgatttactcaattgcactcttaactaatgttaaaagcttacttgctttaaacagccttttcttctttctcttaaaagtttcatttggggagctggtcttctaagaaacggataaagccacataattaaagcagttgaactatagggaaagcactgaacaaaccactttggagtaaatagctactcttagaaaagagggataagcagaccatgtaggttttctgtctctcaaatcttagagttcataaatttacttgaggttgcctcaagaactcagggaacaatactgtaaactgtcttcctgaactactgtagggcctctctaagaatttgaaatgtataaaccatgtgacctcatttatttgtcttatatatttacagccatactagaatttttatttctacgtttttagtaaatttaatattctgggggaaaaaaggccttgattttagggttaaaaacctgacttatagaagagtttatttaatataggtcaaaattttctgtgtttcttattccttctatacctcaaatctgattctaagaatttcttactgtgataatcattggcatgccacctgaggtcaaggagtgccaaataggactttccactcatgctcaagatcaaaactttatagaacagtcaacattttagattcggtaaccttttttttcttccaattataatctctgctagccacttccgccagcagttggtggaagacttactaggtgcagggcactttccaagttcatcacaacaacctgcttgttttcatgagacaataatccgaaaagttcgctttgatatattcctggagggccaagcccatctatttacaaaaggtgaacagcaaaatcaagcactgctttatgggcaggaacacaagagaaagcaaactgcccaagaagtcatcatgtcagaaactcaatctcaacaaaataatttccatcagggaacttcagggtttcttgggggcttatgagtctcaccggtcaacccaggaggcctcactacaagagccttgacaaggcactgttttttgtgggactgggagttcacactgatgaagcaaacctttgaatttttgcacagctcttgtcagaaagccctgagttccccctggataaagagttaattttaatccttccctataattatacttcaaaatatttgacatctgctattatgccttctttagatctttcttctgtggtgcagacatttctagtaagtgtttgactacttgtatggcattagctttcacagaaaattgtttcacttaaaactgtggattggcctaggctaaggacaaaaataaactaagtacctgtagtgtatttatgtgatatgtgtcaagttactcaaagttattgctgttggaactgaacaataatatttcccagatagctggccttagcatgtgatcacggttgttgtatttttaatttttgtcttttacagtatgagaggtgtaggttaatttgtttatttcctataaatttgtatttatgtgtatataaaatgtacaatgaatgtaaatatgactttctggaaagtttagactacatttagaatctctattcaaaatcaaaatgctgctcaaatgaatttaaccaacatctaggtgcttaatttctcattttatcccacttatgagattgggaaaaagatcaatatgagaaataccatacagataccttaaatgtatgcatttgtgcaacaatttttgagaaggtgagtggcaatttataatttagttggcaatttataatagaacttatagcttttaaaagaccttttaaagacattaaatgtaaacttaaaaatgtttagatcttgtttcaaactttacaatagcattcttcaaaatattaagttatatattttataggcatttagttgcttattaaaagcactgattttcaaactttttgatttaagaacaattatttaagatcgtctcagaagatgggatcttcgtttcaagaaaagggaatcaagtttgcctttgagataatacgttacactaagaaaaggaaaatgtggatagtaaaacccacctctctcatcctattgtactctcttctgctttttagaagcctgcacttaagcttagatttgtgaagggagagtagaaggggagaagtagaaccacagtgttttatttatttttctaaaactcttactaaatccagattttttaaactgttttaaatgtgaattcttcccagaaatttcaatgcattgcatatttagccttcggcatatttttcatgaatagatcatgaagtcataggcttccaaggcataggaagagatcttgcaggtctagtattttaataatgcactattacccagggcagatattatgagaaactgtttcttctctaagggtttatggcagactttgcttttttaacatgtgagaaatgaattttttattttgtgatttatgtgatttcttttgctgagtgaaggaaaggagaaattgttgctattgtcagcatcttaaaggtatttccagtcaaggcaaggctaagtgctttgtgatagtattaagcaagtcatgttttgaatggattacctgtagtgactcattggaatgatataattatacaagtaatgccaaaaaccaagtcaaagcctaattaaccaaagcactcatttaaaaatcatcatgtttggacctatctggacctctcagcactgtaaaatagttttggttttgtggcatatgaatagctgtttaacaaatcaaagttagctttttgcttctcagcttttttgggcaatacaagttaagttcttaatggggagacattatcatggcatgacttaagggaacattggtttgtgaaggaaaaacagattatctaaagccatctctatgtttctgttcagataaagattaatgagttctgtgtttatatcagctttgtatatttcatcttagccattctatcctagaaagattttaatgtgagcttaagatgtaaataaataattttgcaaacatgccttttgttttctatataccctgaccttttaataaagtttcagtgtatttatcaaaaaaaaaaaaaaaaaa

SEQ ID NO: 594 - DNA, 5446 bp, Human
cgggaacccgtcaggaaggacataaacaaaacaaacccgaggcagcatggagaggggccgtggcccctgcagcggaaccggacccagtccctgagccgcccctacacccacagacagcatcgcacagaattattttaaaaaaaagcagtgatccaagcaattgaattggaagcactctggggaaacctgctgtttattgtggaaatcatcttcgatcttggaattgaaagtaaagctggaaaggaatttacaaacaagaaaaaaaagaagtttggaatcggattcacaggatctgggcttggaaatgcctcagcctagtgtaagcggaatggatccgcctttcggggatgcctttcgaagccacaccttttcggaacaaactctgatgagcacagatctcttagcaaacagttcggatccagatttcatgtatgaactggatagagagatgaactaccaacagaatcctagagacaactttctttctttggaggactgcaaagacattgaaaatctggagtctttcacagatgtcctggataatgagggtgctttaacctcaaactgggaacagtgggatacatactgtgaagacctaacgaaatataccaaactaaccagctgtgacatctggggaacaaaagaagtggattacttgggtcttgatgacttttctagtccttaccaagatgaagaggttataagtaaaactccaactttagctcaacttaatagtgaggactcacagtctgtttctgattccctttattaccccgattcacttttcagtgtcaaacaaaatcccttaccctcttcattccctggtaaaaagatcacaagcagagcagctgctcctgtgtgttcttctaagactctgcaggctgaggtccctttgtcagactgtgtccaaaaagcaagtaaacccacttcaagcacacaaatcatggtgaagaccaacatgtatcataatgaaaaggtgaactttcatgttgaatgtaaagactatgtaaaaaaggcaaaggtaaagatcaacccagtgcaacagagccggcccttgttgagccagattcacacagatgcagcaaaggagaacacctgctactgtggtgcagtggcaaagagacaagagaaaaaagggatggagcctcttcaaggtcatgccactcccgctttgccttttaaagaaacccaggaactattactaagtcccctgccccaggaaggtcctgggtcacttgcagcaggagagagcagcagtctttctgccagtacatcagtctcagattcatcccagaaaaaagaagagcacaattattctctttttgtctccgacaacttgggtgaacagccaactaaatgcagtcctgaagaagatgaggaggacgaggaggatgttgatgatgaggaccatgatgaaggattcggcagtgagcatgaactgtctgaaaatgaggaggaggaagaagaggaagaggattatgaagatgacaaggatgatgatattagtgatactttctctgaaccaggctatgaaaatgattctgtagaagacctgaaggaggtgacttcaatatcttcacggaagagaggtaaaagaagatacttctgggagtatagtgaacaacttacaccatcacagcaagagaggatgctgagaccatctgagtggaaccgagatactttgccaagtaatatgtatcagaaaaatggcttacatcatggaaaatatgcagtaaagaagtcacggagaactgatgtagaagacctgactccaaatcctaaaaaactcctccagataggcaatgaacttcggaaactgaataaggtgattagtgacctgactccagtcagtgagcttcccttaacagcccgaccaaggtcaaggaaggaaaaaaataagctggcttccagagcttgtcggttaaagaagaaagcccagtatgaagctaataaagtgaaattatggggcctcaacacagaatatggtaatttattgtttgtaatcaactccatcaagcaagagattgtaaaccgggtacagaatccaagagatgagagaggacccaacatggggcagaagcttgaaatcctcattaaagatactctcggtctaccagttgctgggcaaacctcagaatttgttaaccaagtgttagagaagactgcagaagggaatcccactggaggccttgtaggattaaggataccaacatcaaaggtgtaatcagcctcattggaccactggtcagaaatgtctgcgttttgtcacgttatccattgtaaattttcattctgttttgcatgtcagttagcattatgtaaacatttacaattaggttacattgttttaagaactaagtagcataagtgaagcatgatccaaaatacttgattattgcattttcagagcataaaccatgattaaaactgctactggcatcagaattgaaaatcatatgtttaagtaaatgttaggtacagattacaaaaatctgttaaagcaaaacattttggaggagtgaaatagtaaaatgccaagtattgtggcagatttatgctctgaaccacacaaaaaaattgaggaagcatttttttaaacagtcggtttaaattgtttttagaattattgctttttgttctaattttccacaaccattaatctcacttgtatatggcacacccagcacttgtgcctgtgggccatattagatgttcattgtcagagctcaagatgatatatataaatatatatatatatatatatatatacacacacacacacaaatgtctgtgcaagtaagaaaaaaaaagcatattctttgtgccttgtattttggggaaactctaaaactggtaatattttgtatgatgaaaaccctaatgagaaaaaacaagatatatagatggaaaaattatggggtttaaatgtttttttgttccaactctttttcagattttttgaatgtatataggactatgttgaaatgtagatatatgccacagagtctgtgtattgtataaaaaacaaaacaaaaaacaacaaaaaaaagatggctctagaaaactcatatttcggtacttgaccggaagaagacaaatacttgcacattattgcgattgttttattttttgtaccaaagacaaatgcaactgatatggcaaactgccagtctaagtaaagttttgcacagcttacatgatactgtatgaatgtatgaaaaaaaaggagaaaaaaaagaaaaaaaaaggtcagggttagggatcttactgaactgtgaattttatttctgtttgggtccaattatctacagaaggagcatccatacatacaaatattattttgctgttcctctagttcgcttccatagtagataagttggtggccatttagatgtcttttatttctgcacttattgtaggaaattttaatatatttcattttagtaagctattgataaaatagtttttgactttgaaaattaaaatgtttatttagcttattgtagtatacttccaccagacaacaaaatagattatttttattgtattatgtatatatatatatgtaaagaaagaaaaaagctaaaaatatctaattctttagttgccacttttccgattgatgtattattgtgcatgtaatattttcaaagatcaacacaggctaaaacaaaaacaatttatagatttttatatttttgtacaggtattttcaaactagcttcttcaaacttaacatgtgacttattcttctatagtttctagaattgagaaacattaacacatttagtttttaggtgctcttttttgctcatataaaacagcttcattagtcagtgttttaactgtgttcaagctttacctcttgatgagaaatttcttatgtcaaggcagcattataaaccttcccccacagatttttccatcctgtctctcttactgttttattctcaaatcttgtgctttgaactctgaaaactggtggcttaaaaactaaaaaaagaaaaaaagcatatttagcaaggaaaaaaataccaaaaatttcaggcatagctgctggaaaaattatctatttctccattacccactgtaggatttcttttttaattatactttgactataaagtgtcaaagtataatttgttcttttcttttactttgttaccccatttgtaagctatagcatatgaagctatatatatagcttgtgaaggtttgatctagaacacccagtaacaaatgaacaatgttgcttacctgcttctttgacatcttaaaaaagaaatccaaggaggattgtaaggattgtcttaccaccttagctgaactgtgatgcacaagatttttctatgtgtttggtggaaatgtacctggtttgtacattcacgctaaacagatgataagctcaagtctgatggtttaatagaatgtaagttcatcgtttaaagcttttcctttttaggttggagaaggcaaaacacaggcttgcaagttggaagtatatgaagtcttgacagagtgtgtctggtaaattgaaaagtgtttcaaactatggcagttttgcaatcaggtgaaaatcacctcatgatattcagctgataaggtttataaaattgcccctttctagctgctctgttaggaattctggtttttgatacttttttcctgtctgcaaaccagaatttgattttttggtcttgcatttcaaaaaaaaaaagactttgaatctgtttagtagattccatatctttgagtttcagtgttttatatgtactacttaagttaaatagttaaaagcttttaaatagttgagctttttaatgttgacactttattttgtacctatttatatatgtatgtatatcttagaaaagcactttgttaaaaaaaaattgcattttatatgattcctgccatttgctgctaaatctgggctggtcagaatgctgcagcgatacttgatctatataaaaacctggcagtaaaatgtagagtgaaagttaaatcctcttgctgttttaactttatcataaagatgacataggcaagctgtgcagctttacattttaaccaggggactctgtggcatttaaaaccgtctagaaatggttgtactttaatgccagtaataatctgcttcctctattgtcattaaaatatatacgtttagtgtatcacacaaaccaatcttataagggtaatgtaaaaaccccaacaattgtacatgttctgtttttgaaaattgtggcatgtatttttgggtgaagatcattagagaagagttctctaaaggttttctgtgttcatacatggtatacagatagctcataatgaagtccagaatcttacttttaagtgaaggcattgtgaattcacctcaagtaaacccattgttccaaagcaattataaactttgactctagtactactatgatttaaaaaaaaa

SEQ ID NO: 595 - protein, 639 aa, Human
MPQPSVSGMDPPFGDAFRSHTFSEQTLMSTDLLANSSDPDFMYELDREMNYQQNPRDNFLSLEDCKDIENLESFTDVLDNEGALTSNWEQWDTYCEDLTKYTKLTSCDIWGTKEVDYLGLDDFSSPYQDEEVISKTPTLAQLNSEDSQSVSDSLYYPDSLFSVKQNPLPSSFPGKKITSRAAAPVCSSKTLQAEVPLSDCVQKASKPTSSTQIMVKTNMYHNEKVNFHVECKDYVKKAKVKINPVQQSRPLLSQIHTDAAKENTCYCGAVAKRQEKKGMEPLQGHATPALPFKETQELLLSPLPQEGPGSLAAGESSSLSASTSVSDSSQKKEEHNYSLFVSDNLGEQPTKCSPEEDEEDEEDVDDEDHDEGFGSEHELSENEEEEEEEEDYEDDKDDDISDTFSEPGYENDSVEDLKEVTSISSRKRGKRRYFWEYSEQLTPSQQERMLRPSEWNRDTLPSNMYQKNGLHHGKYAVKKSRRTDVEDLTPNPKKLLQIGNELRKLNKVISDLTPVSELPLTARPRSRKEKNKLASRACRLKKKAQYEANKVKLWGLNTEYGNLLFVINSIKQEIVNRVQNPRDERGPNMGQKLEILIKDTLGLPVAGQTSEFVNQVLEKTAEGNPTGGLVGLRIPTSKV

SEQ ID NO: 596 - DNA, 1348 bp, Human
aacctacctcagtttcagagaatgaaggcatttcaaccataccaagccctgtgacctcaccagttttgtcccgccgacactatggagaatctataacaaatataggcaaagcaagcatattaggggctgctagcattggaaagggacttggaggaatgttgttctcaagatttggacgttcatctacaacacagtcatctgaaacatcaaaagactcaatggaagatgagaagaagccagttgcctcaccttctgctaccaccgtagggacacagacccttccacatagcagttctggcttcctcgattctgcatatttcagacttcaagaatcgttctttaatctcccacaacttctttttccggaaaatgtaatgcagaataaagataatgccctcgtggagttggatcacaggattgattttgaactcagagaaggccttgtggagagccgctattggtcagctgtcacgtcgcatactgcctattggtcatccttggatgttgccctttttcttttaaccttcatgtataaacatgagcacgatgatgatgcaaaacccaatttagatccaatctgaactcttgaaggacatgaatggcctaaaactgattttttttttttccgttaaaatgtgtgtgtcaagatacggagatttcagggttaaagtatatttcagttttctttagggcaacatatatttgaatttaaaagcactttatttaaaaaaaaaagaagttttcagttctgaagaagtcatttacagtttgcatcattttaattatgagtctgacaaaaccttctccagagaatcaagcaagacctggatgtgaagaaggtttgggtaaactgcatgtaaaggctacaaatcacaatctgattcctcccaaatataaaggcatatggaacataatgtattaaccaaagtatgttataaatcaaaaatggtcaaggttcagcatattctatatgaagatcacaaggtggtatcgttttagatttctatgaaggctttcatttgtacatccctttgaaaaaatataacagatttaaaatgttttgaatttaacttgtttagaaaaactaatgcttaaaacaatatttgaactactgtatttataatttattacctctaattgctttatttcagtgtatgagacattactgttttaatgtttgctttgaacataatttaagaaccagatttattttctatagtgataaacccttttttctcagaactccatctttgtactcttcagatgaatatatagacactgtggcatacattttttttcattaaaaacttatggcttcaaaaaaaaaaaaaaaaaaaaaaaaaaaaaa

SEQ ID NO: 597 - DNA, 5806 bp, Human
  unsure 2900: unknown base
  unsure 2901: unknown base
  unsure 2902: unknown base
  unsure 2903: unknown base
  unsure 2904: unknown base
  unsure 2905: unknown base
  unsure 2906: unknown base
  unsure 2907: unknown base
  unsure 2908: unknown base
  unsure 2909: unknown base
  unsure 2910: unknown base
  unsure 2911: unknown base
  unsure 2912: unknown base
  unsure 2913: unknown base
  unsure 2914: unknown base
  unsure 2915: unknown base
  unsure 2916: unknown base
  unsure 2917: unknown base
  unsure 2918: unknown base
  unsure 2919: unknown base
  unsure 2920: unknown base
  unsure 2921: unknown base
  unsure 2922: unknown base
  unsure 2923: unknown base
  unsure 2924: unknown base
  unsure 2925: unknown base
  unsure 2926: unknown base
  unsure 2927: unknown base
  unsure 2928: unknown base
  unsure 2929: unknown base
  unsure 2930: unknown base
  unsure 2931: unknown base
  unsure 2932: unknown base
  unsure 2933: unknown base
  unsure 2934: unknown base
  unsure 2935: unknown base
  unsure 2936: unknown base
  unsure 2937: unknown base
  unsure 2938: unknown base
  unsure 2939: unknown base
  unsure 2940: unknown base
  unsure 2941: unknown base
  unsure 2942: unknown base
  unsure 2943: unknown base
  unsure 2944: unknown base
  unsure 2945: unknown base
  unsure 2946: unknown base
  unsure 2947: unknown base
  unsure 2948: unknown base
  unsure 2949: unknown base
  unsure 2950: unknown base
  unsure 2951: unknown base
  unsure 2952: unknown base
  unsure 2953: unknown base
  unsure 2954: unknown base
  unsure 2955: unknown base
  unsure 2956: unknown base
  unsure 2957: unknown base
  unsure 2958: unknown base
  unsure 2959: unknown base
  unsure 2960: unknown base
  unsure 2961: unknown base
  unsure 2962: unknown base
  unsure 2963: unknown base
  unsure 2964: unknown base
  unsure 2965: unknown base
  unsure 2966: unknown base
  unsure 2967: unknown base
  unsure 2968: unknown base
  unsure 2969: unknown base
  unsure 2970: unknown base
  unsure 2971: unknown base
  unsure 2972: unknown base
  unsure 2973: unknown base
  unsure 2974: unknown base
  unsure 2975: unknown base
  unsure 2976: unknown base
  unsure 2977: unknown base
gggggtagctggcggaccagagccggtagcgaggttgggagagacggagcggacctcagcgctgaagcagaagtccccggagctgcggtctccccgccgcggctgagccatgcggctccctgacctgagaccctggacctccctgctgctggtggacgcggctttactgtggctgcttcagggccctctggggactttgcttcctcaagggctgccaggactatggctggaggggaccctgcggctgggagggctgtgggggctgctaaagctaagagggctgctgggatttgtggggacactgctgctcccgctctgtctggccacccccctgactgtctccctgagagccctggtcgcgggggcctcacgtgctcccccagccagagtcgcttcagccccttggagctggctgctggtggggtacggggctgcggggctcagctggtcactgtgggctgttctgagccctcctggagcccaggagaaggagcaggaccaggtgaacaacaaagtcttgatgtggaggctgctgaagctctccaggccggacctgcctctcctcgttgccgccttcttcttccttgtccttgctgttttgggtgagacattaatccctcactattctggtcgtgtgattgacatcctgggaggtgattttgacccccatgcctttgccagtgccatcttcttcatgtgcctcttctcctttggcagctcactgtctgcaggctgccgaggaggctgcttcacctacaccatgtctcgaatcaacttgcggatccgggagcagcttttctcctccctgctgcgccaggacctcggtttcttccaggagactaagacaggggagctgaactcacggctgagctcggataccaccctgatgagtaactggcttcctttaaatgccaatgtgctcttgcgaagcctggtgaaagtggtggggctgtatggcttcatgctcagcatatcgcctcgactcaccctcctttctctgctgcacatgcccttcacaatagcagcggagaaggtgtacaacacccgccatcaggaagtgcttcgggagatccaggatgcagtggccagggcggggcaggtggtgcgggaagccgttggagggctgcagaccgttcgcagttttggggccgaggagcatgaagtctgtcgctataaagaggcccttgaacaatgtcggcagctgtattggcggagagacctggaacgcgccttgtacctgctcgtaaggagggtgctgcacttgggggtgcagatgctgatgctgagctgtgggctgcagcagatgcaggatggggagctcacccagggcagcctgctttcctttatgatctaccaggagagcgtggggagctatgtgcagaccctggtatacatatatggggatatgctcagcaacgtgggagctgcagagaaggttttctcctacatggaccgacagccaaatctgccttcacctggcacgcttgcccccaccactctgcagggggttgtgaaattccaagacgtctcctttgcatatcccaatcgccctgacaggcctgtgctcaaggggctgacgtttaccctacgtcctggtgaggtgacggcgctggtgggacccaatgggtctgggaagagcacagtggctgccctgctgcagaatctgtaccagcccacagggggacaggtgctgctggatgaaaagcccatctcacagtatgaacactgctacctgcacagccaggtggtttcagttgggcaggagcctgtgctgttctccggttctgtgaggaacaacattgcttatgggctgcagagctgcgaagatgataaggtgatggcggctgcccaggctgcccacgcagatgacttcatccaggaaatggagcatggaatatacacagatgtaggggagaagggaagccagctggctgcgggacagaaacaacgtctggccattgcccgggcccttgtacgagacccgcgggtcctcatcctggatgaggctactagtgccctagatgtgcagtgcgagcaggccctgcaggactggaattcccgtggggatcgcacagtgctggtgattgctcacaggctgcagacagttcagcgcgcccaccagatcctggtgctccaggagggcaagctgcagaagcttgcccagctctaggagggacaggacctctattcccgcctggtgcagcagcggctgatggactgaggccccagggatactgggccctcttctcaggggcgtctccaggacccagagctgttcctgctttgagtttccctagagctgtgcggccagatagctgttcctgagttgcaggcacgatggagatttggacactgtgtgcttttggtggggtagagaggtggggtggggtggggtgggggctgtctgtgtccaggaaacttaattccctggtgactagagctttgcctggtgatgaggagtattttgtggcataatacatatattttaaaatattttccttcttacatgaactgtatacattcatatagaaaatttagacaatataaaaaagtacaaagaagaaaagtaaaagtacccattgtttcacttcctggagataaccatagttgctattttgctgcctgtcccatcagtcgtttatctgttgtttgagatagaaattaaccaaaaatgacataaatattcatgagattgccttcctatatccttccttgttcctaccagtgtctgctattttgaagaagctagggtctggagggacagagaacagttccctgattaacagtattaatagcgacattggtaacagctaccatttatagagttttaatgggagtaggagctatgctaagtgtttttcatgtattatcgtttttaatcattatccccaacctatgannnnnnnnnnnnnnnnnnnnnnnnnnnnnnnnnnnnnnnnnnnnnnnnnnnnnnnnnnnnnnnnnnnnnnnnnnnnnnggtggagttggagtttgaacacaggcctgaccctagagtccacaccctgacccaatcaattatattgcatcttgggtccataaaccctaatccataatcccatcaagaaaagctctgctgctcttagctctaaataattcagaatctattctcttctctccagtcccgttgttatagtcttcactcatagacttaagatgatcccatcaccagagaggtttctctaccattagcttccctcttccggccattcttcacaaagtcatttttctaaattctgtgtcacatacgatgatggcatttctggaaattccttcaggtgctctcaagccctgctgcagagatccttttcagagcacacactgttccagcccatctgtctcaccctctcctgttgtatccagctccacgacaaacttctgccttccccaacacctttgtgcctttgcatatggtgttttcttgcccattttctgctcgactcgcccctgattttcaagttcaagacttaactcagggttcaggtcttccaggaggccttacttatgtcgtcagtctggggaactctccatgtgcttctatcactgtgcggttacctctttcacagcccttttaaagttctatcttccctttcccaccttttttgaccttccactagaccatgagcacctgggcggaaagccatatatcttattaagctttatatctgctacctggccgagggcctaattcatagtggagaataaatagtcaattgaataaatgaataaatatctccaccatcgtactaatcttaatcctccctgcccactcccaccactgaaaatgcaacattgtacacatcactggttgttgggagggacttaccttggaaagttgctattctaggaaagagaaaccttcatattcctggaaacagcaggtagtttccagtgctggcaatgaattccccagaactgctgttttggattttttcttgcctggcagctgttgggagcagggtgcagtgaggatggggtgagagtgggcagtttcttgtgcagatttgcctttctttcatcctggggctgacttgcagctccacacccatccatctctcaaatttcacagagggtaaaataggcatttggagagaaagaactctggcctgattcctttctctcccacaaatgtcctttattcataaaacaggaataataattcctgtatctcccaactacatggaagctgcagccctcacagaagaagatgatctgagaaattctttgatttcctcagtacagttatacccatgcatcataatactttaagcctggaaggcatcttaaaaataatgcaacagtcaaacctaattttacagagaaactgacatgaaatcacgcagctaatcatgataaagctgggtggaaaacttatcttgatgggcagtacaggaagatgcagtagaccttaagatgtcctgaaagtttcttatctcaggggaaactcccaggtaggctttatgtcagggacacagaaaaatgctccctgaaagtcaaaatattcgggctagacagacaaattcctgtaagtgtggtttgtctgggaaccacagatgtcactaatcctggtttgctccagagttctttttgttcactcctaccccccatcaccatttgattgatctccttaccctgtaatttccccttcttgtcgcttacctgcagtatctttcccacccaggcatgccttattctttctaaaggaaagtatgaatggagaggggaaagcttgggaaactgatagatttccttggatgccaaaacacctccatagcctgtctgcccggccctatgtggaaacagcattgagtttcaagtcctttatgcctccacccagggatagccacttggaatccacatggcaattgtgaaacaagcaggaaatgcgtaattgtcagaattttgtggggaaaggactagggaataaggaaaacaaagatcttccttgtgttttagagctgtcagctagaggagcacctgcttgagtctgatgccatctaatggtcccagaagaaactgggttttgaacctagagttccatggactcttaggaattagactactactactactaagcattcactggtgcttactatgtgctattgctgtgccaagtatctgaaacctgtcttcttaccttatttttcaagataattctatgtggcaggtattactatctcaattctaagagtgagaaaatggagttttagaaacatttactaacttgcctgggtcacatagctaaggaagaggtggacttgcccagctttgcataaaactcctcaaaagagttgcctatactccctgactccacttatcttcctactatcctctttttaaaatatattatttatttatttaaataagcaatatatgaatgtggtttgaaattcaaaagacacaaagaagtatacagaggaaagcctcactctcaatccttctcaaggtttgctaattcctcttgcataggcaatccgttcttccagctttgtgtttatctttccagagaagtttactgtgtattaagcaaatatgtatatctttattcttgctcagtattttcgcaaacagcagctgtctaagttcactgttctgaactttattttttaaattaaaaatatatggctatgtagtattctattttatggaagttccatatttcatttatcctgtttccttctactgatggctagttaggttattggaagtcttttgctgttgctagttagtcttgtatagacattgtaatgcacatgtgcaaaaatacaagtatgatacaatcttaaaa

SEQ ID NO: 598 - protein, 686 aa, Human
MRLPDLRPWTSLLLVDAALLWLLQGPLGTLLPQGLPGLWLEGTLRLGGLWGLLKLRGLLGFVGTLLLPLCLATPLTVSLRALVAGASRAPPARVASAPWSWLLVGYGAAGLSWSLWAVLSPPGAQEKEQDQVNNKVLMWRLLKLSRPDLPLLVAAFFFLVLAVLGETLIPHYSGRVIDILGGDFDPHAFASAIFFMCLFSFGSSLSAGCRGGCFTYTMSRINLRIREQLFSSLLRQDLGFFQETKTGELNSRLSSDTTLMSNWLPLNANVLLRSLVKVVGLYGFMLSISPRLTLLSLLHMPFTIAAEKVYNTRHQEVLREIQDAVARAGQVVREAVGGLQTVRSFGAEEHEVCRYKEALEQCRQLYWRRDLERALYLLVRRVLHLGVQMLMLSCGLQQMQDGELTQGSLLSFMIYQESVGSYVQTLVYIYGDMLSNVGAAEKVFSYMDRQPNLPSPGTLAPTTLQGVVKFQDVSFAYPNRPDRPVLKGLTFTLRPGEVTALVGPNGSGKSTVAALLQNLYQPTGGQVLLDEKPISQYEHCYLHSQVVSVGQEPVLFSGSVRNNIAYGLQSCEDDKVMAAAQAAHADDFIQEMEHGIYTDVGEKGSQLAAGQKQRLAIARALVRDPRVLILDEATSALDVQCEQALQDWNSRGDRTVLVIAHRLQTVQRAHQILVLQEGKLQKLAQL

SEQ ID NO: 599 - DNA, 5041 bp, Human
aaaatggcggctgccactgtggggcttctgccggccggtagtccctggcgctgctgacccagcatcggcttttctacgtcttgaacctggattcgcctaggggttgggaagggctgtggacggcgttgggggaggcctgacgagattaataaagaactcttcagaattcctggtgtttcatcatatatacgactaagatatcaactcttctagcttgctgtttctggaccaaaaaaaatgacgtctattatcaaattaactaccctttctggggtccaagaagaatctgccctttgctatcttctccaagttgatgagtttagatttttattggactgtggctgggatgagcacttttctatggatattattgattccctgaggaagcatgttcaccagattgatgcagtgctgttgtctcaccctgatcctctccaccttggtgccctcccgtatgctgtcggaaagttgggtctgaactgtgctatctatgcaaccattcctgtttataaaatgggacagatgttcatgtatgatctttatcagtctcgacacaatacagaagattttacactctttacattagatgatgtggatgcagcctttgataaaatacagcagctaaaattctctcagattgtgaatttgaaaggtaaaggacatggcctgtctatcacacctctgccagctggtcatatgataggtggaacaatatggaaaatagtcaaagatggagaagaagaaattgtttatgcagttgacttcaaccacaagagggagatccatttaaatggatgttccctggaaatgctaagcaggccttccctacttatcacagattcattcaatgctacatatgtacagcctagaagaaaacagagagatgagcagcttctgacaaatgtcctggaaacacttcgaggtgatggaaatgtgttaatagcagtggacacagcaggcagagttttggaacttgctcaacttcttgatcagatttggaggactaaagatgcaggattgggtgtttactcattggcactcctaaataatgtcagttacaatgtggtggagttttctaagtcccaggtagaatggatgagtgataaattgatgagatgttttgaagacaaaagaaataatccgtttcagtttcgccatctctctttatgtcatggtctttctgacttggcccgtgtacctagccctaaagttgtacttgccagccaacctgacctggaatgcggattttcaagggatctctttattcagtggtgtcaggaccctaaaaactcaatcattctaacctacagaactactcctgggactttagcacgtttcctaattgataatccttctgaaaaaattacagaaatagagttgaggaaacgtgtgaagcttgaagggaaagaacttgaagaatacttggaaaaagagaaactaaagaaagaagctgccaaaaagcttgagcagtcaaaagaggcagatatagattccagtgatgagagtgatattgaggaagatattgaccagccatcagctcataagacgaagcatgacttgatgatgaaaggtgaaggcagtcgtaaaggaagttttttcaaacaggcaaaaaagtcctatcctatgtttcctgccccagaagaaagaattaaatgggatgaatatggagagattatcaaaccagaggatttcttagtgccagagcttcaagctactgaagaagaaaaaagcaaattagaatctggtttgacaaatggagatgaacctatggatcaggatttatctgatgttcctactaaatgtatttctacaacagagtctattgaaataaaagcccgggttacctacatagactatgaaggacgctctgatggggattccattaaaaaaatcattaatcagatgaaaccacgacagttgatcatcgtccatggcccaccagaggccagtcaagatctggcagagtgctgtcgcgcctttggtgggaaagatattaaagtgtacatgccaaagctacatgaaacagttgatgccactagtgaaactcacatctaccaggtgaggttaaaagactcacttgtcagctctcttcagttttgtaaggcaaaagatgctgaattagcttggatagatggtgtcttagatatgagagtttccaaagtggacacaggggttattttagaagaaggagaactaaaggatgatggagaagactcagagatgcaagtggaagctccctcagattctagcgttatagcacaacaaaaggccatgaaaagtctgttcggagatgatgaaaaagaaacaggtgaagaaagtgagatcattcctactttggaacccttgccacctcatgaggttcctggacatcagtcagtttttatgaatgaaccaaggctgtcagacttcaagcaagttctcttacgggaggggattcaagctgaatttgtaggaggtgtacttgtttgcaacaatcaagtagcagtccgcagaacggaaactggacgcattggattagaaggctgcctttgtcaagatttttataggataagagaccttttatatgaacaatatgccattgtataaaggacatgatgtcaagaagtatctgcttgacctttctaagaaaaagggattcttatcttactctgagcttttgatgttttgttttgtaacatacaaaaagaatctgccagaaaaacttacatgtatcagatttttaaaaatataaatagagaacattttgcaaatgctcaaatgagcattctatcttttggctttcagagtgatagagctcctaacaggtgtacaggcccaagagttgaaggtgattggttttctttacagactccttgttctctagaagggctttttacttgaataaaacaatgcaacttagcaaaccaatttatggccttagagaaacatttttgcatgagttcttacaaactgtttgttatattttctggaatgataagtgagaattatttagaaaagacatgctccaaaaaaaaaacaaaactgataaaacagtttttcgaaacttacttttaaaagcatacgtgctatgactctctccagtttgaatatgcaattgttttcacaggcaggatgtctgttttctgcctgtatttcccagtgatttactctagggtaaggtagtacacatttggttcagaaattaatttttatttctcctatatcttgttttatcaagattttgttgtggcatttcaatgtaaattataacaccatcatttgagtatacataattcaaaagaactacttgatgcagtatagtcttaagggttctgcatacattttagaaacatcttagccgtaagttaggtcctgtgttaaactgtttagtgctctgtttttaagaaaacaaatgttgaacctcacacttttatgtggtgacagtgtaatttaattaaaaggtgtaaatgttttcatctcttaggcttgctgtctcctaaggtcacccaagcagtggttggattttatacacattactactaaaataatactgaagttggataaggttatcctttctgtatttgcgtctttcttgtgactaaccaccctgatatagtattaaccactgtgttcaagagtaaaaacaatatatgcaattttcattgaacttaaagagtgaaaaccatgtaaactattgaaactattgtaatccattaatgcttttttagaatggcagaccttgatgtttatttctcaaatggttaagccctcttctttactcttaatttttttttgagacagagtcacccaggctggagtgcagtggtgagattttggctcactataacctcttcctccagggttcaagtgattctcccacctcagcctcccaagtagctgggactacgggcacatgccactgcacctggctaatttttatatttttggtagagacagggtttcaccatgttggccaggctggtctcaaactcctgacctcaagcgatccacccacctaggcctcccaaagtgctgggattacaggcatgaatcaccacaactagcctacccttagatttttggaaggatcgatcttatttaactatgtgtggaacaacccagtaatatcagactcgaattactatttcattctatttcaaatgcttataaagctactattgtagattatagtgttaatgcaaagtttacagacttttgatatggaaaaccagataaaacaatgttacaaaaggcaaatataaagagtatgttttctttttagtgctttggaaaaatttcacttaaactcttattactgtatagattaagccctataatgctatttatattccaggggaacgaaaatctgaatttgttttatgatttaaagcatctggtttgcatattgtattgtaatactgatacagtttggctgtgtccccaccaaattgaattgtgttaatagttcccataatccctacgtgttgtgggagggacccagtgggcagtaatttaatcatggtggtggttaccctcatgctgttcttgtgatggtgagttctcatgagatctgatgggtgtttttttttgttttgttttttgttttttgagatggagttttgctcttgttgcccagactggagtgcaatggcacacgatctcggctcaccgcaacctctgcctcctgggttcaagcgattctcctgcctcagcatctcgagtagctgggattacaggcatgcaccaccacgcccagctaattttgtatttttagtagagacggggtttctccatgttggttaggctggcctcaaactcccgacctcaggtgatccgcccgcctgggcctcccaaagtgctgggattacaggcgtgagccactgctcctggcccaagatctgatggttttgtaagggaattttccccctttgcttggcacttcttcctgctgccatgtgaagaaggatgtgtttgcttccccttccaccatgattgtaagtttcatgaggcctccccagcctgtgggactgtgagtcaattaaacgtgtttactttataaatt

SEQ ID NO: 600 - protein, 782 aa, Human
MTSIIKLTTLSGVQEESALCYLLQVDEFRFLLDCGWDEHFSMDIIDSLRKHVHQIDAVLLSHPDPLHLGALPYAVGKLGLNCAIYATIPVYKMGQMFMYDLYQSRHNTEDFTLFTLDDVDAAFDKIQQLKFSQIVNLKGKGHGLSITPLPAGHMIGGTIWKIVKDGEEEIVYAVDFNHKREIHLNGCSLEMLSRPSLLITDSFNATYVQPRRKQRDEQLLTNVLETLRGDGNVLIAVDTAGRVLELAQLLDQIWRTKDAGLGVYSLALLNNVSYNVVEFSKSQVEWMSDKLMRCFEDKRNNPFQFRHLSLCHGLSDLARVPSPKVVLASQPDLECGFSRDLFIQWCQDPKNSIILTYRTTPGTLARFLIDNPSEKITEIELRKRVKLEGKELEEYLEKEKLKKEAAKKLEQSKEADIDSSDESDIEEDIDQPSAHKTKHDLMMKGEGSRKGSFFKQAKKSYPMFPAPEERIKWDEYGEIIKPEDFLVPELQATEEEKSKLESGLTNGDEPMDQDLSDVPTKCISTTESIEIKARVTYIDYEGRSDGDSIKKIINQMKPRQLIIVHGPPEASQDLAECCRAFGGKDIKVYMPKLHETVDATSETHIYQVRLKDSLVSSLQFCKAKDAELAWIDGVLDMRVSKVDTGVILEEGELKDDGEDSEMQVEAPSDSSVIAQQKAMKSLFGDDEKETGEESEIIPTLEPLPPHEVPGHQSVFMNEPRLSDFKQVLLREGIQAEFVGGVLVCNNQVAVRRTETGRIGLEGCLCQDFYRIRDLLYEQYAIV

SEQ ID NO: 601 - DNA, 6960 bp, Human
acttccgccccctccccctgccattggaactagctgagccgaactagttgcggccaccgagcagccggctctcggcacctcctcctccgcctccctgtctcctgttccattcgcctttcctcttctttcctggcccacgccgctccgaggcctcgcgaccgccgagcctgcagcctgccccgcggccaacatgagcttcttgtttggtagtcgctcttctaaaacttttaaaccaaagaagaacattccagagggttctcaccagtatgagctcttaaaacacgcagaagccacacttggcagtggcaaccttcggatggctgtcatgcttcctgaaggggaagatctcaatgaatgggttgcagttaacactgtggatttcttcaatcagatcaacatgctttatggaactatcacagacttctgtacagaagagagttgtccagtgatgtcagctggcccaaaatatgagtatcattgggcagatggaacgaacataaagaaacctattaagtgctctgcaccaaagtatattgattacttgatgacttgggttcaggaccagttggatgatgagacgttatttccatcaaaaattggtgtcccgttcccaaagaatttcatgtctgtggcaaaaactatactcaaacgcctctttagggtttatgctcacatttatcatcagcattttgaccctgtgatccagcttcaggaggaagcacatctaaatacatctttcaagcactttattttttttgtccaggaattcaaccttattgatagaagagaacttgcaccactccaagaactgattgaaaaactcacctcaaaagacagataaaaggatgcagagctgtgcaaattgttcctcaaatgaagcagtgtggagtgtattggggattttgttatattttgtttttatctggattgtttttgtcctaggtttgggggcgggggcttgtttgggttcctttttctttattctgattatgtgaaaccatattctattgctaggggaagccaagaaccattctctatacacttgataagggtaaatttatcttagtgtttttaaacttggttttggttacttgaggagttttttaataatattgtgtgctgcaagaaagtgcttgttgattgaactgccgatggattggtttctgtgtggtataaattgtggcccatttatgaagtccccaaaagagttatgtttttaagtgccttggcaggctcacttctgaggtgcaaaacatagatatagaactgaacagggcttgaaacaatattaggattactacccagggcacttactggtgcatgttgtaacatatctatgataaaagccatagtttacctaaaatggtgatttccagcctttactgctttgaagaaacagaatttgtaaaggtatgcatgtagaacataaaaaatatttcttaattattttttatattgatggtaatatattacgttcaacaatgcttaaagctctacaagcaggtcttttcccacctcttgatatctgtgatactgaaacttgaggatgttgaaatgtattacattttggcttctttctacatgttaactgcactgtagatgtaaaaattcaggttatatataggattgccatcttcagaggtgatgctgaactgtgaggtttcctagtaattgccaaatgagccgtaagtctgcagaattcccttctactttgaagagaaggggataggaatgtatatttggctgggggcatggagatgttcgtatgtatgaggagttagggatggggagtcaagttctagaaagttttgtctgaaaacctttgaatagaatggcatgaagattttaatcaattacttataaacaaagtcttagagacttccttttaggaatcaacttccatgagaagttaaaaataaattattaattttaggtacagacattaaacatggaatttaaggactgttgggggaaattgatcacttcttagcatttccattcagtgaatggagctgatgtttgcctgtcattttaagatgataccataccttctttggttattataggtccagtttgaagcattctgacttctggtttttccaccctgaaaggaaatgtttttctttgcagcagtattagataatgaaaaatgctaattcagtagttattaacttctaaattttattcgccatgactttctagtgaattattaccataaataacaatttcagaaacttagtttttagaataaatattaatttttccacttcagttttattctagaaaataccctttttagaaatccagttttagttttgtcattttcgataaatctttcttcagttagaaatatatatccttccttcagttgaaacatatacctttttcacatctaggaagaaatgcttgctctgaaatagtatagattaaaaacactcagtagaaaagaatctaaaattaaatgaatttgttttgccattaaagtagagcagtgatacaatttaatgccattacaattatgttgactagaaactgcctttttctccacttcatttctagcaattatttaccaagtaccaacagtagaagtaacaggaaagcctggcagagttaaatatcttggacatttattggtaaagcttatttataaactgcagtcagagctagttaatttccttaaatctttttgtattcagatagataatatgaatcattatgggttgattcagaaataaaatttgtgaggtgattttgaatcttgtccatataggaaaatgaagcacagaattactcagtcttccatattgtatttgacttcatatcaatctagtaaaaaaggagttgcaatagccaagtatagagagaatagtgaaaaattaatcttgccctttcaagccttatacagtagtacactgtacttgtttttagtagtaagacctactttcccactatatgtagatagtttgttttcactgtgccagaatctcaggtgcctgcttagagtatttctttaatcacagtcactgggaagtaaggagatgtatatatgtgtatatatggtaacaaagcatagcagttctctaggggagaggcctggcattgcacatggtgttacatggctacaagtaaggaaaaaatcagaaagtgaaagaactgatgtaataaaaggttgatttggttggttcccatgaaagttagtaagatgcccttttaaatataaggatcagtgctttgttctgcagcagagtttgctgataaatgtctgttggattctttttggatttctttaattaatttgtaagtaaccaagataattattttcccccttgctctctatattaatacgtagctataaagcaacagttggttttcttatcctttgataaaagcatcccataaaatataaagtagtaagttaacatagtattattgtcacacacaatgctttttttggttaaatgttgatacgaagcaatgttttggaattactttaattgatggagtagtggtggtagagagaaattaataacaaaaagagtgaaaatattttaattagcagtagatggtgctactggctttcatttgctgacttgattattccctttctcttaaaaaccatggcattagactgcactaaattaacaagcatgttagttgctggtagaggttttggaggttaatttaccttaaattggaagacttttaattgcagtctctttctaccttccctctgttagtcatttgtaaattctaaatggtcaccataaaatgtattaggtaggagaagatacgttttatgtataatatatctcagactgagttactgcctgtcttatcaggatggataaaacactacagtctcttatcaggaaatagagatgatgtggatatttatatattacatatataaccaccagactccattttatatattagcattttccttgcttatgggaaaatagcaaaacaacatttcatttatacttttgtttacccctctctgagacaggttttgataaccactgaaatggtagaatatgtgagatacaaatattgagttgtagaactttctttttaaggtgaataagtcatgccttaacatccaaataagagttcatcttcagagtggttcttttgggagcactgtttattccagctatactgcaaaagtataatgtttttggaactgttctagagcataccatgaaaagcagtttgttattatgcaggaaaatcagtttcatcattttagttacactaaacacttttggcagcttaatatgacctttttaaattttttttattttttttatttttatttctttaagatggagtcttgctctgttgcccgggctggagtacaatggcatgatctcagctcactgcaacctccacctcctgggttcaagcatttctcctgcctcagcctcccaagtagctgggattacaggcagcaccacacctggctaattttcatatttttagtagagatggggtttcaacatattggccaggctggtctcaaactcctgacctcaagtgatccgccctccccagcctcccaaagtgctgggattacaggtgtgagccaccacagccagccagtatgacctatcttaatcatcagctcaactgtaatttaaatttggctgttctctggagctaaaccattagggaagttcaaaggaatgtgccatgatttccgaatttgcacaagagaatgttttaagcattggtagcataattgaataaaagaatagtttcctgatgtcactattttgaagtggaaattatcacttggatgtggaggttttactttttaaaaacattcagcttaattaccttaccttaattaccttagttagatatactaatggaaaaaaaccaagtcctttctctagaacttgttttctatttttgttccttttcatgaaaacttctcaatttaattttaactactgtaggatagtattgattgaatggatactatggaaaagtggatccaatatttaagatagaagtagtttaaggagacaacagcctttactgccatttttttttaaatgttttcactcagatgaacaatttgactttaataaaagactggagatttttgtacaaagaaataggaataagtttcatatactaattatgctgagttttaagcctacatatcacaaaatatttagaattgtataaccttttcatatatttataacttttaatgtctttttaaaagatgtgggaccaaaaatatatttataatttggaaatgtgactgcataccaataagaaaacttaccttattttgaaatttatctgggatattaaagaatctaccaattcttaaaaacacagatttatactttaagcttattttaaaattaaagaatatataccaattcttagaaacactttaaggactactcttaaataacttaaatatcagagttttgttgtaatattaaaatttaccgtggaaatcactgttgttcagctatcaccttaattgtgtatgatatgataaatgtttagcagtaaagctatcttaagatttaatggaaaagtttaatttgaagatgtaacaaaaattctgaccacagttgattctgaatttttaaggctttcctaataggctgatcacagagaataatccattttgaaggtataaaactgcactgtatgtctgtcacttgtagctgaactgattcacattttgacaaaagagagaaaatacaaaaatgagttttgcaaatgtaataactttttctgcatatagaactaaataattgaaaaatatgggctatagttctcaaaggtagatagtaaaatcactggctttttccagctgtatgtttttccactgtgcgtgtacacacacactggaaaataattaggctgattttgcaggtcttcattgttagagattctgaagtatttactgtcaattcataggtttcagtttatttaggaaattagtgtttgacagctttttttaaattatttcactgaagctgagattattagtgatacaaagttaaaatttcaatatttaatttctctatatattattaatattaaattgttttttacttataaattcatgttctcatctgatttaatattaaatttgtataggtgggcgtttcttaccattttgcacaagtttttgtttttctgaaatacttaattgtgcaggttgtaaaaaagattagtgcattttcattttaaggatgctttgctccttaaattgttcgacagaaatgactttttagggaaagtagtttttttggagctactaacttgtatttattattgtacatgcataaccagggtggtgagggcactaatcttgtaggaaacacttacttgatgttttatttgaacttttcctataggtttaacttttactgcatagaattaacactaggaacagtgtcatgaaatctgggttgaaggagaatacagtatatatgagaacacttaaagttcaaatagaaatcatttctgaagacaaaagcagaggaatattgtcagtgccaagtaatggaagaataagggcggcatttacactgtgcaagtattgagaagagtgcataaagacagggaactactctcatggagacagtttctctcttataatcaagtaactagaaggggaaaaatcatctaagttatgaaatccaacataggcgctatattacaaactgtgccggattatgcaaattgtagttgttactgatcaaagtttaattgcttcatttttgtttaaaaagggatactgatgtcagaaaatctgtaatatgttttattcaaaagatgtaaataatgtatacagacttgtatgtgatgggatgggaaatatttaaattctaggtgtttttttttttttaaagaagaaactcaatgtttataagaaaaaaatgaataaatagttacgtttggccatgaatcctgaaa

SEQ ID NO: 602 - DNA, 2106 bp, Human
accaggcgcggtccggaggccgagggcgaccacagcagcctccgcctcctgctgctccggactattctgcgctgggctagtcggcggtgacccggactgcgcccggcagtggcttcgcgggcgacgcgtcgccatgggctctcgctggagcagcgaagaggagaggcagccgctgctggggcccgggctcgggcctgggctgggggcctcctggagaagccgggaggcggcggcggcggcgctgcccgcggcggtcccgggtcccgggcgggtatacgggcgccgctggctggtgctgctgctcttctcgctgctggcgttcgttcagggcctggtctggaacacctggggtcccatccagaactcggcgcgccaggcctacggcttctccagctgggacatcgcgctgctcgtgctgtgggggcccatcggcttcctgccctgcttcgcgttcatgtggctcctggacaagagaggtctccggataactgtgctcctgacatccttccttatggttttgggaactggtctaagatgcatacctatatcagacttaatccttaaaagaagattaattcatggaggacagatgttaaatggattggcaggtccaactgtaatgaatgcagcaccatttctctctacgacgtggttttctgcagatgaaagggccacagccacagctattgcatcaatgctcagttatcttgggggagcatgtgcatttttagttggaccacttgttgttccagctcccaatgggacatcacctcttcttgctgcagagagcagcagggcgcatattaaagatcgcatagaggctgtgttatatgcagaatttggagttgtctgcttaatattttctgcaacactagcttatttcccaccccgacctcctcttcctcccagtgttgctgcagctagccagcggctgagttatcggagaagcgtttgtagattattaagcaattttcgatttttgatgattgctttagcatatgccataccacttggtgtatttgctggctggtctggagttctggacttaattttaacaccagcgcatgtcagccaagtagatgctggctggattggattttggtccatagttggaggctgtgttgttggaatagctatggcaaggtttgcagattttatcaggggtatgctgaaactaattcttctcctcctgttttcgggagctacactgtcatccacgtggttcaccctgacctgtttgaacagcatcacacacctacctttaaccacagtgacattgtatgcctcctgtattctcctgggagtgttcttgaatagcagcgtgcctatattttttgagctttttgtggaaactgtctacccagttccagaaggaattacttgtggagttgtcacttttttaagtaatatgtttatgggagtacttttattttttctcacattttatcatacagagttgtcttggttcaactggtgccttcccgggtcgtgtttgctcagtctcctcctcattctgtgcttcagggaatcctatgacagactctatcttgatgtggttgtctccgtttaatagcacagacttgaaggagtttaaaaggaggctggaaatcaatactgcacactgcacatttgctcagaattgcacatctaacaggaaaagagggagaagaaagaaacttcattcagaggttttgttaggttacagattatcacattaatttaattactactaggtaataataatgggagacttgagtgataataggggattttaaaactctacagatggcatacctgtgcctgcttctggggttggaagtgtgacttcttacacataaagcactacctaagtaattctctctctgttttgtgccagtgctaaactactgattacttgtaattatgaaaagaaataaagggtgtctatcatatgaagataacgccttccctaagtcacatatcagaataggaagatatgccactaacttctaaagaagttcaaaccctgtatccaattttaatgataaaatagccaagaggtatatcgatgatggaaattagccacatgtacactacattttttctaataaagccatttcttatatg

SEQ ID NO: 603 - protein, 478 aa, Human
MGSRWSSEEERQPLLGPGLGPGLGASWRSREAAAAALPAAVPGPGRVYGRRWLVLLLFSLLAFVQGLVWNTWGPIQNSARQAYGFSSWDIALLVLWGPIGFLPCFAFMWLLDKRGLRITVLLTSFLMVLGTGLRCIPISDLILKRRLIHGGQMLNGLAGPTVMNAAPFLSTTWFSADERATATAIASMLSYLGGACAFLVGPLVVPAPNGTSPLLAAESSRAHIKDRIEAVLYAEFGVVCLIFSATLAYFPPRPPLPPSVAAASQRLSYRRSVCRLLSNFRFLMIALAYAIPLGVFAGWSGVLDLILTPAHVSQVDAGWIGFWSIVGGCVVGIAMARFADFIRGMLKLILLLLFSGATLSSTWFTLTCLNSITHLPLTTVTLYASCILLGVFLNSSVPIFFELFVETVYPVPEGITCGVVTFLSNMFMGVLLFFLTFYHTELSWFNWCLPGSCLLSLLLILCFRESYDRLYLDVVVSV

SEQ ID NO: 604 - DNA, 362 bp, Human
  unsure 121: unknown base
  unsure 122: unknown base
ggtttcaccatgttagccgggatggtcttgatctcctgacctcatgatccacccacctcagcctcccaaagtgttgggattacaggcgtgagccactgcgcccgggcaagacctttttttnnaaaaaaaaaaaaaaaaacttccattctttcttcctccagtctgttctcacataacagagtagttttggtttttaattttttttggttgtttgctgttttttgttttttaaggtgagttctcactatgtttctcagactggtctcgaactcctggcctcaagccatcttcccgcctcagcctctcaaatagctgggcttacaggcatgagccaccacacctggccaggatttggttgttta

SEQ ID NO: 605 - DNA, 2429 bp, Human
cttgccctcacctccgaatcctgacaacttcccggtcatcccgacccagcgttttccttgggattccgacctccccctcagagaagacaggaggtcgggaaggacctgcagcccaggggcttccaagatgaggcccagagactcggattatcaatgcagagaaatctgaattcaatgaggatcaagccgcctgtgggaagctgtgcatccggagatgtgagtttggggctgaagaagagtggctgaccctgtgcccagaggagttcctgacaggccattactgggcactgttcgatgggcacggcggtcctgcagcagccatcttggctgccaacaccctgcactcctgcttgcgccggcagctggaggccgtggtggaaggcttggtggccactcagccccccatgcacctcaatggccgctgcatctgccccagtgaccctcagtttgtggaggaaaagggcatcagggcagaagacttggtgatcggggcattggagagtgcctttcaggaatgtgatgaggtgatcgggcgggagctggaggcctcaggccagatgggcggctgcacagccctggtggctgtgtccctgcagggaaagctgtacatggccaatgctggggatagcagggccatcttggtgcggagagatgagatacggccactgagcttcgagttcaccccagagactgagcggcagcggatccagcagctggcctttgtctatcctgagcttctggctggtgagttcacccgactggagttccctcggcggctgaagggggatgacttgggacagaaggttttgttcagggatcaccacatgagtggctggagctacaaacgtgtggagaaatcggatctcaagtacccactgatccatggacagggtaggcaggctcggttactaggaacactggctgtctcccggggcctgggagaccatcagctcagagtcctggacacaaacatccagctcaagcccttcttgctctctgtgccacaggtgactgtgctggatgtggaccagctggagctacaggaggatgatgtggttgtcatggcaactgatggactctgggatgtactgtccaacgagcaggtggcatggctggtgcggagcttcctccctgggaaccaagaggacccacacaggtactgtagctgctggggacctgcctgggcctgggttggtgccagcagcaagcccaagtagttatggctgagaagacagagcactgacaatgagctggcagctggccaggatcagggctgtctcaagcttcttggaggaggcagggagaccgtgggttccgaaaatccctggatttagactctcatggtccagcccgtggccctcccagacttgctgcttgcttggtccacagtcggactgcattgcttgggtccccatgtccagccttgtgcagtgagttctcctaaggtctggccttgcccctttgctctgcccctgaagtctatctgcaggatggtcttcacaggttcccaaagctggcccagatgctgatacacagcacacagggaaaggaagacagtctcacagaggaagggcaggtgtcctacgatgacgtctctgtgttcgtgattcccttgcacagtcagggccaagagagcagtgaccactgaggattcagacactgtatcccagaactgctctagtgcccgggtgtggtctgggcatccctccagtgtgaccaagagcaaatcctgcctgccctatccctagccaccgcccagtgctctcactatccacctcaacacacatccatctcaagaggaacatttataccaggcagtcagagctggaagtgtatggagagcccagcccaccaggtcctgccttttgcggtgataaccttctctggcagagtgactttacaacttaactaggaaacccatgtgaggctcctcagacaggatcttgaacagcccaaagtatcattctcagataggggcacccaagctaagggtattagccaaagatgccaggatgggtagctagcccatgtttagatccaggtctccaattcatggttatcagggcatgtgttcaacaacccccaaagtccacgcaggtggcttgtagaaacctttgggcagcctcatgtctgctaaaacagccatcttcaagacagcccctgaaaagagaccagttcaggtcctgccctgctgttctttgctggagatgaggaacaggtgctggggctaaagtttggggtagagcacaagggacaagaggaactcttggagttggctgggtgagagggctctccatttgctacctgtagtagcctgcctcttaactggttgcttctccctagttccagccctgccctggtctgatgccccaacactgcccttgctttgttttccctgtcacctccctattattaaatgttttctacag

SEQ ID NO: 606 - protein, 270 aa, Human
MHLNGRCICPSDPQFVEEKGIRAEDLVIGALESAFQECDEVIGRELEASGQMGGCTALVAVSLQGKLYMANAGDSRAILVRRDEIRPLSFEFTPETERQRIQQLAFVYPELLAGEFTRLEFPRRLKGDDLGQKVLFRDHHMSGWSYKRVEKSDLKYPLIHGQGRQARLLGTLAVSRGLGDHQLRVLDTNIQLKPFLLSVPQVTVLDVDQLELQEDDVVVMATDGLWDVLSNEQVAWLVRSFLPGNQEDPHRYCSCWGPAWAWVGASSKPK

SEQ ID NO: 607 - DNA, 9166 bp, Human
atggctttggtcacggtccagcggtcacctacccccagcaccacctccagcccctgcgcctcggaggcagacagtggggaggaagaatgccggtcacagcccaggagcatcagcgagagctttctaactgtcaaaggtgctgccctttttctaccacggggaaatggctcatccacaccaagaatcagccacagacggaacaagcatgcaggcgatctccaacagcatctccaagcaatgttcattttactccgcccagaagacaacatcagactggctgtaagactggaaagtacttaccagaatcgaacacgctatatggtagtggtttcaactaatggtagacaagacactgaagaaagcatcgtcctaggaatggatttctcctctaatgacagtagcacttgtaccatgggcttagttttgcctctctggagcgacacgctaattcatttggatggtgatggtgggttcagtgtatcgacggataacagagttcacatattcaaacctgtatctgtgcaggcaatgtggtctgcactacagagcttacacaaggcttgtgaagtcgccagagcgcataactactacccaggcagcctatttctcacttgggtgagttattatgagagccatatcaactcagatcaatcctcagtcaatgaatggaatgcaatgcaagatgtacagtcccaccggcccgactctccagctctcttcaccgacatacctactgaacgtgaacgaacagaaaggctaattaaaaccaaattaagggagatcatgatgcagaaggatttggagaatattacatccaaagagataagaacagagttggaaatgcaaatggtgtgcaacttgcgggaattcaaggaatttatagacaatgaaatgatagtgatccttggtcaaatggatagccctacacagatatttgagcatgtgttcctgggctcagaatggaatgcctccaacttagaggacttacagaaccgaggggtacggtatatcttgaatgtcactcgagagatagataacttcttcccaggagtctttgagtatcataacattcgggtatatgatgaagaggcaacggatctcctggcgtactggaatgacacttacaaattcatctctaaagcaaagaaacatggatctaaatgccttgtgcactgcaaaatgggggtgagtcgctcagcctccaccgtgattgcctatgcaatgaaggaatatggctggaatctggaccgagcctatgactatgtgaaagaaagacgaacggtaaccaagcccaacccaagcttcatgagacaactggaagagtatcaggggatcttgctggcaagcaaacagcggcataacaaactatggagatctcattcagatagtgacctctcagaccaccacgaacccatctgcaaacctgggctagaactcaacaagaaggatatcaccacctcagcagaccagattgctgaggtgaagaccatggagagtcacccacccatacctcctgtctttgtggaacatatggtcccacaagatgcaaatcagaaaggcctgtgtaccaaagaaagaatgatctgcttggagtttacttctagggaatttcatgctggacagattgaggatgaattaaacttaaatgacatcaatggatgctcatcagggtgttgtctgaatgaatcaaaatttcctcttgacaattgccatgcatccaaagccttaattcagcctggacatgtcccagaaatggccaacaagtttccagacttaacagtggaagatttggagacagatgcactgaaagcagacatgaatgtccacctactgcctatggaagaattgacatctccactgaaagacccccccatgtcccctgatcctgagtcaccaagcccccaacccagttgccagactgaaatctcagatttcagtacagatcgcattgacttttttagtgccctagagaagtttgtggagctctcccaagaaacccggtcacgatctttttcccattcaaggatggaggaactgggtggaggaaggaatgagagctgtcgactgtcagtggtagaagtagccccttccaaagtgacagctgatgaccagagaagcagctctttgagtaatactccccatgcatcagaagaatcttcaatggatgaggaacagtcaaaggcaatttcagaactggtcagcccagacatcttcatgcagtctcactcggaaaatgcaatttcagtcaaagaaattgtcactgaaattgagtccatcagtcaaggagttgggcagattcaactgaaaggagacatcttacccaacccatgccatacaccaaagaagaacagcatccatgagctgctccttgagagggcccagactccagagaacaaacctggacatatggagcaagatgaggactcctgcacagcccagcctgaactagccaaagactcagggatgtgcaacccagaaggctgcctaaccacacactcatctatagcagacttggaagaaggggaaccagctgagggggaacaagagctccagggctcagggatgcacccaggtgccaagtggtaccctgggtctgtgaggcgagccaccttggagttcgaagagcgcttacggcaggagcaagagcatcatggtgctgccccaacatgtacctcattgtccactcgtaagaattcaaagaatgattcttctgtggcagacctagcaccaaaagggaaaagtgatgaagcccccccagaacattcatttgtcctcaaggaaccagaaatgagcaaaggcaaagggaaatacagtgggtctgaggctggctcactgtcccattctgagcagaatgccactgttccagctcccagggtgctggagtttgaccacttgccagatcctcaggagggcccagggtcagatactggaacacagcaggaaggagtcctgaaggatctgaggactgtgattccataccaggagtctgaaacacaagcagtccctcttccccttcccaagagggtagaaatcattgaatatacccacatagttacatcacccaatcacactgggccagggagtgaaatagccaccagtgagaagagcggagagcaagggctgaggaaagtgaacatggaaaaatctgtcactgtgctctgcacactggatgaaaatctaaacaggactctggaccccaaccaggtttctctgcacccccaagtgctacctctgcctcattcttcctcccctgagcacaacagacccactgaccatccaacctccatcctgagtagccctgaagacagaggcagcagcctgtccacagccctggagacagcagcaccttttgtcagtcatacaacccatttactgtctgccagtttggattacctgcatccccagactatggttcacctggagggcttcacagagcagagcagcactacagatgagccctctgcagaacaggttagctgggaagaaagtcaggagagccctctctccagtggcagtgaggtgccatataaggactcccagctaagtagcgcagacctaagtttaattagcaaacttggtgacaacactggggagttacaggagaaaatggacccattgcctgtagcctgtcgactcccacatagctctagtagtgaaaacataaagagtctcagccacagccccggtgtggtgaaggagcgtgctaaagaaatcgagtctcgagtggttttccaggcagggctcaccaaaccatcccaaatgaggcgctcagcttctctcgccaaattaggttacttggacctctgtaaagactgcttaccagagagggagcctgcctcctgtgaatcccctcatctcaaactgcttcagcctttcctcagaacagactcaggcatgcacgcgatggaggaccaagagtccctagaaaacccaggtgccccccacaacccagagcccaccaagtcttttgtagaacaactcacaacaacagagtgtattgtgcagagcaagccagtggagaggccccttgtgcagtatgccaaagaatttggttctagtcagcagtatttgctccccagggcaggacttgaattgactagttctgaaggaggccttcccgtgctacagacccagggactgcagtgtgcatgcccagctccagggctggccgtggcaccccgtcagcaacacggcagaactcacccccttaggagactgaaaaaggcaaatgacaaaaaacggacaaccaaccccttctataataccatgtgattctgagcctacacatgtgactttctagaagaaatgtttgtaaaaggggcaggtgtaatatgtaaggaacatgcactttattggttaattttataatattttggtcattttactgtttctggtgcatgcagggtttgggtgtttttcagtgtgtatgtgtgtgtatatgtaaggggaaagagagattgatctggatggcaagaccgtttatcattttttatttaaaaaaatcaaacctcaaaaaagtcattttcagagaacacctttatcaaaggcaaattgctgtttttcagtcagctgccacctgcttctcattttgccctctgagaaaaggcatggtttcttaattgagggaaggaagcagattcggaggggtggagataaagctggggattggagatgttcccctgcctttgtgatgatggtttggtttccagacctgaggcatcgaatgggctaaaggtcagccagaagtcagagggctctcagccttcatccagccgcagccctttagagttcctgaaggaggcaggttccgctttgctttaaaagagggtcttccggtgttccagagtgtatcgttacagtaagacatgataatggccggctctgcaaatttatcatatagtttttttcccaagaaaattatttttgaaattaaaacaggaccccaaatgaaatccaagtggtcttctgtagaggaaagcatgataagaggaggaagacataaagttgggggtggagaggctgctgcccagaaactgctgggttggtgggatccacacagatgggcatcttggctctccctgccagaaaaatgtgctctgcagtgtcctcccaactgaaaacaacagtgacatgtttgaaaagcagcaatcgaaagtcagtgtgttcttgtaaaatgaatatgtatgtagggttttaacccttccattacttgaataattctttgggccttctgagtttaatggccatattttcttccagtttattttccttccccatgctgttgtccccatgctgcctatttttttaaatttcatagattatatttgaattgttacatatgtttaacatccattgaatgcaacgttttatttttggtattatcactgttaacacttttttttccttttcctggaaggtttgtcatttctctaaagtttgtacacagtatttatgtacataatattgtcactgtcttagtgtcttgttcatgttgtagggtaattttgatttattctttttaagaaggagtagagttgcaactggaaaacacagacaccagaaatgaaagtgttgggtgttgataggaatctgtacaatatgttgatggtggctgtagttgtttaaatggagacttccaatcaccagctcctgccaaattatgcattagtaactttttcctcagagacacccctaaaggctcccattaggtcacagcgtgactgaaagctgatttctctgtgagactgaaatcccagaacattgtttgccagtatctcaaccacagccaggaagtatatgtgagttgcccagagtggaagctcctagtagaggctgaaggccacaggggaggcctcagccaggggcaagtgcccacagtgactccatttaggatgctgtcgttttgctactgttgtggagatccttaacgcagcagcgcctgtcataaacaagcctcttgtagcttcttacagaaaacagatttagtctagcatgaaacacctctgcatctcattgaaactgaagaggcttgcagatttgctttcgttgatgtccacgttactgaggattgactgagtatagactggagacaggtttttggcttatcacagcactgaggaaaatacaaatgcacagactgtcagcatgatgtcagaggccagagtttggtgggggcagatggcagggcgacccaaaagatgcagaaaaggtagactggggccactgggtcttaagaggagctgtgaagttgtgtggaagccaaggctgggtctgacatccctgccaggaagcaggttggacagaaaccacttgctaaaagcgtctctatggtgcagtgattatgtgtaccctgtgctgttgctcagtagtctccttgaatgttcaagtatctcatccactcagttttgtgattcctggatatttgtgtgttgtaaagtgttttgttaggtggtatgaaccaatgtgaggaggcttgagacagggttatggatttccagagctcttccatgtagaataccctgccttcttgaagcagttccaccaccaatatgatggggaagggcaggaacttatggcagggtggggagagggtttgcctggaagttaagagagtggcatccacttgtggtaaccccttacgatgatgacatcccacacactaagaggtacaagcaggaccaaagttttggactgttccctcttctcccctccactgtgtttaatgttcactcactgcattaaataacaacaaagatgggacaaaacccactaatactgtggggaaaaaaaattttcaagagcagaggaaagtctttctgcctttttataattactttttttatcatttaatttacctgcctaaataaacatcttctacagaatatctgtcattcaaccatgccaaggagtttgtgccagccttttcagactcccagaattgggtgttcctgggttatttacatagctgagcagtgtccaggggaggtgcgcagtgaactgtcaaggactttccagactgtcttctcttcagacttttataatctccagtggcatctttcccttttcttttgttcatgacctgacctgaagcagcagatttgatagactggcaaagatgaataggaaaaactttgactcttgcccagtgcctgcctgcctctctctctctcctctctctctctctctttttaaaccaccatagactctcacttattttggaggagtgtatgtgcatgtgtacacatatgtacatatataaaaacagttgatgttttggtgtatggggtaaaagccccaggagcatacagaacttgagctgaacctggtcagtagaaagggaaaccccaaccctttcttgatttttggagacacccaggactaatggatactgtagtagacatgtagtactatagtaccgtaatattcatctctcctcattttagttgcctttcagattctaaatgtttgggatcattcctatcatcttagtctcttcaggatctttagtattttcctggttctgaggaggcttgagacagggttatggatttccttgttctgtgtctttatccctactgatagttcctctttctcattttgcaaactacccagagctccaaggacagcctgaagatctcagtgcctcaggctctgaggtactctgctcacaggccccagacagatgctgttgggtaaactcaaagcttcctatgagaagcttctgagatgtagcaggtcacagaagtgttcacctgtttcatctgaggatttcagttctgaagtgatctaggcatgtttggtaaaaatgtttttgtgagagttctttttttaagaaagcattatgcaaaaagtcacttttaagggcatttaaaaatttttaagtaaagccattctttggcttttttggactatttgtggatactttgtttacattttgaatattaaaatgtgcatcatcttgtcggccatgcagtcctgcaggcatcagtgccctggctgtcctgtgagtcctcatgcagagcagggccatcatggtcagcccttgtgagtaagtgggtatacgctgaagctgacttccgtctgtgtcctgccctcccatccagcactctctatggaaatagttgtcatttcctcagtgatggtgtgtcttatagtgatggttgtaatggtgaatggctagtgtcattttgtttaattttgttttgctttttgatggtggataagatgaaattttagctgtttcagcatcaatccaacttaaaagcatcttggactttgttttcccttccaaactaaaagatcaaggcatgtattagacacaagcatatttgctgcctcaactcctctgacacccatattaggaaaaggcctgccaccaaagcaggaagctgcacactcctaacccttctcccagggtgtggggtcccttgacgtcatgaagagctattgcaaggtgcttctgtacttttccagcctggaaatggagggtgactggccctggctcctgctatgagaagataaccagcctcattttctcagtgccccagaggtctaggataggatttctaaactggaatcatccttaatcaccttgaagatcccttaagaggcatttgactggtgctgccgtctgtgtcctcaaagcaatgctggtggcagcgtcctgtgtacacatgcagagctaatacccaaactaaaaactgggtaactggccctgaagtgcttcccaatcagtaagcccacagggaaatgtttgatttttatgttctgttggattttggtttgcttggcatatctaaaggtgcctttacttttctttttttttttttttctttctgctttgttttgtaggacttgttctaacatggaaaacaagtccagaagactctcctctgactgttacctttgccccaagccaccccaaacttttatgctcatgttttattaaagcaggtgctccctggaatctctgggacatttttgaggcatttgaagcagaatatagagtggtctcatctccttccttaatcttcctggtggttgggatgttccacttgtatcatagatttttttattacagatatgctccactgtttttaaatgtgaacttgtgcgcaaatgtgcagattcaatgttcttgttacagattgaataaatttttattttg

SEQ ID NO: 608 - DNA, 2112 bp, Human
aatgcaaaatgccatcgacgcagaaaatcaaagacagaacgagactcctaatcaaaaaaaaaacacaagaaaatagagtgaggcttttttaccgtatatacataaaatacttatgaaaattagaagataatttggcattcctactgtttcactgtacttccattgaaatactctttccattaaaatattctgaaacaatatagtaataatggaattgtgatcttcagttgcacctcaaccattttttttgcttatgaactaaaatttctaacattaacatttcggcatgtaataaaacaagggcctatctcctttaaaatttaacattccatgtaacttttctgacttatcattcataagttgcaaatattactattttcctaaaccagggtacacaatttaagttgccacttattgatgacagaatttctggatagtaggattttaataggcgagcaaataaaattcaaatcaatttcaaggaaaaacatctggccaggggtagcttgatttcgcccccaaaaatactgaagactaatccattgacattcataatgggacagctaagtaccaaatagctaactactccctatggaggtttatgcaagcagagtaccaggggttccatcatatcaacctggcaatgcacttggtggttgtgtgaccttgagaaagtctcttactcttgtttatgtgttcttactttagaaactgagactttatttgtggttttcacactatttcagcagcaaaaactttttcaaggaaaatcttacagaacctttaaacacgtgtgcatacacacataccctataccccactatataaaagtcatattattataaatttccttattatataaactttatatactataaatgtgattaagtcaatgaataaaaacattaatgcattggtgatatccagcatgtttgaatttggtgagtaacacacatatagtgggagtcgttttttttaaaaaaattttttaattaaattcaagtcaaatttgcagaaccctgtatctcctccatagattcttagtattccatggaacatattttgaaaaccttgggatagatgatccactgaaatcttttccagctctaagattttaaattgtccttttagattagacttgctgagtttaattcagattacctaattttaaaatgtttctgaaaagtgaacagagttaccttacagagttttggatctttccagggatagccaatgattttatcccccagaatccttcacctttcaaggagttatttaacaatgagcccagtgactcaatagggcccaaacctttttattttacaatatgagctccaagacacttactgatctactgtgaatataaaatgttattagccttatcaaataaataaatgagcacagctctttgttcgctctattgaactgggtgataattatttagatgtgaatgttaggtcagttctactgtaataactaatcgtaaaagttgtaaatttgtttaatggatgaaatgtacactttttgtattctgtacagctttgtcttttttaaatatgaagtacttaaatgtacttactatgataggaaatataatgtgtgccttctaggatttgtgaagtggtttcatgaactctaaggaatttgttttccctatcctaactcagtaacagagggtttactccgattatgtatagaaccttagtttgagaaaatgaattttactatgtactgaatttagaggttgagaataataggatctgtgttattcttagtacccactgataaattgtgcaataaataatctttcgcaagtgattttaggtaattgaagagattattttcctatgtaatttcacattctaatatactaaatgtttatattccttagagaactattttatattgtgcgctgggggcttgtgatgtttgtgtgctgttttaaaattcatttcaaattggactcgatttccttatatctaatatatatctgggagaaaaggctgcttgaaaatatcttttgattcagtgatttttaacattgggaagttgagtttattaaaaggtagtctgaagaatttgcatttttaactgctattgtctgaagtcaag

SEQ ID NO: 609 - protein, 37 aa, Human
CKMPSTQKIKDRTRLLIKKKTQENRVRLFYRIYIKYL

SEQ ID NO: 610 - DNA, 9747 bp, Human
aggggcgagaaagcgccatggcggcggcggcggcggcggctgtgtccggtgctcacgccgcggcgaggttcactaagaatctttccccagacaaaatcaacctgagcaccctgaaaggggagggtcagctgaccaacctggagctggatgaagaggttctacagaatgtactggagctgcccacctggttagccatcactcgggtctactgcaacagggcctccatccggatccagtggacaaggttgaagacacaccctatttgcttgtgtctggataaggtagaggtggagatgaagacatgtgaggatcctcggccccccaatggacagtctcccattgcccttgcttcaggacagagtgaatatggctttgccgaaaaggtggtggaagggatgttcatcattgtcaattctatcaccatcaagattcactccaaggccttccacgcttcttttgaattgtggcagctccagggctatagtgtcaaccccaactggcagcagagtgaccttcgccttacccgcatcactgacccctgccgaggagaggttttaacatttaaggaaataacttggcaaacactccgaattgaggcagatgctacagacaatggtgatcaggacccagtcaccactccattgaggcttattacgaaccaaggcaggatccaaatagccctcaaaagaagaaccaaagattgcaatgtgatatcctccaagctgatgttcctgttggatgacctgctctgggtgctgactgactcacagctcaaggctatgatgaagtatgcagagtcactgagtgaagccatggagaagtcagcccatcaaagaaagagcctggcccctgaacctgtgcagatcactccaccagctcccagtgcccagcagtcctgggcccaggcatttggtggcagccagggcaacagcaacagcagcagcagccgcctcagccagtactttgagaaatttgatgtgaaagagtcctcctaccatctgctcatctcccgcctggacctgcacatttgtgatgatagccagtcccgagagccaggttaggaaaactctgaatggggccaattctcgcatagcccaaaatattgagggcagattcctggattcatccctgaccgcttaacaggaggttgccagagattgcagtgcatgctcagaggggtgctggaaatatccctcttcaagaggacgtctggaaacttgcaggtgatagctgcaaacattgggtacgccactgtgaggccatggggacccgaggccagtgggcccagaagctggtgatggaatttcagagcaaaatggagaagtggcatgaagagacgggtctgaaaccaccctggcaccttggagtagactctctctttcggagaaaagcagattctctttccagtcctcgaaagaaccctcttgagagaagcccctctcagggcagacagcctgcctttcggcctccagcatggaaccgcttacgctctagctgcatggtggtacgggtggatgacctggacatccaccaggtttccaccgctggacagccaagtaaaaagccatctacactcctttcctgcagtcggaaacttcacaacctccctacccaggtctctgccattcatattgagttcacagagtattacttcccagataatcaggagcttccagttccttgtcctaatctctacattcagttaaatggtctgacatttactatggatcctgtcagtttgctctggggaaacctcttttgcctggatttataccgcagcttggagcagttcaaagctatctacaagctggaagattcaagtcagaaagatgaacacctggacatccgactagatgcattctggttgaaggtgagctttccactggaaaagagagagcgggcagagttgcatcgtccccaggcccttgtcttctctgcgtcaggcatgattgccaccaatacacgtcatgctccacattgtagttgttcagacctccagagtctcttccggggttttgctgctgctgagttctttcattccaattatgatcactttcctaaggttccaggtggctttagccttctgcacatgctttttttgcatcatgcctttcagatggattcctgcctgcctcagcctaataccctccctccccagagacctaaggcttcctgggatctctggtctgtccactttacccagatctccttggactttgagggaacagaaaacttcaaaggccataccttgaattttgtagcccccttccccctgtccatttgggcctgcctacccctccgctggcagcaagcccaggcacggaagcttcttttggcctcagaggggaggctgaaaccatcagccagttttggaagtcctgtccagtctgaggctcttgcccctgactctatgtcccatccgcggtcaaagactgaacatgacttgaaaagcttatcaggacttacagaagtcatggaaattctgaaagaaggcagtagtggtatggacaacaaagggcctctgacagagctggaggatgtagtagatgttcatatgcttgtacattccccggcccatgtccgcgtgaggcttgaccactaccagtacttggctctgctttcgcctgaaggaggtgctgcagaggcttcaggagcagctgactaaggatacagagtcaatgactgggtctcccctgcagaatcagacagcttgcattggagttctctttcccagtgctgaagtggctctgcttatgcatcctgcacccggtgctgtcgatgctgactctgcaggctcagatagcactagcctcgtagattcagagctatctccttcagaggatcgggaactgaagtctgatgcctcatcagaccagggcccagcaagccctgagaaggtcttggaggaaagtagcattgaaaatcaggatgtatcccaggagaggccacatagcaatggagaactgcaggactcaggtccacttgcccagcagctggcagggaagggccatgaggcagtagagtccctacaggccaagaaactgagcagaacccatgcctccagctcaccagctgcattgaagcccccagctggcagggagactgctgtgaatggacagggtgagctcatccccttgaagaacattgagggagaattgtcaagtgctattcacatgaccaaggatgccaccaaggaggctctacatgccaccatggacctcaccaaggaagctgtgtccctgactaaggatgccttcagtttgggcagagatcgaatgacctccaccatgcacaagatgttgtccctgcccccagccaaagaccaggttttgccatgttgcccaggctggtctcgaactcctggattcaagccatctgcctgccttggcctcccaaagtgctgggaatataggcggagcccatggccaagacagatgagggggtggcagccccagtgagtggaggtgctgcacgactccgatttttctccatgaagaggacagtatctcaacagtcatttgatggtgtctcattggatagcagtggccctgaagaccggatttcagtggacagtgatggcagtgatagctttgtgatgctcttggagtctgagtctggtccagaatctgttccaccaggatctctttcaaatgtctcagataatgctggtgttcaagggagccctcttgtgaataattatggccaggggtcaccagcagccaacagttcagtttcacccagtggagaagacctcatctttcacccggtctcagttctggtcctgaaggtgaatgaggtgtcttttgggattgaggtacgtggtgaggacctgactgtggccctgcaagcagaggaactgaccctccagcagctgggcaccgtgggactctggcagttcctgcatggacagtgcccaggtacatgctttcaggaatcctcaactttgaagactggccacatcaggccagctgtgggccttcgctttgaggtggggcctggagcagctgttcattcccccctggcctcacaaaatggcttcctacatttattgcttcatggctgtgacctcgagctgctcacttcagtgctcagtggcctggggcccttcttggaggatgaggagatcccggtggtagtccccatgcagattgagcttctgaactccagcatcaccctaaaggatgatatcccccccatctatccaacatctccaggccccatccccatcactctggccatggaacatgttgtgctgaagaggagtgatgatggtgtgttccacataggcgctgctgctcaggacaaaccatcagctgaagtacttaaaagtgagaagagacagcccccaaaagaacaggtgtttttggtgcccacaggagaggtttttgaacagcaggtgaaagaactgcctatcctacaaaaagaacttatagaaactaaacaagccttggccaatgccaaccaggataaagaaaaacttcttcaggagattaggaaatataaccccttctttgagctctgaaaccagtggctcagccatctgtgccaaggagagaggctatcaccagcaatagcaccacctaggacagagggcactgtccagtgctgaataagtcactacggatgccagagggactggggagcactcacttcacttgtgtgggtgtgctttccactagctgttcttacttggactgaggacaagggcaaagcatgattgtatcccaggaaacgggcttgccctgtgtgtggcacaagcatcatgtcttgcctgtataaagccttttggtcctctgtgtactaggtggaatcttctcaacactgtagggccatttcacctcatggtttcatggcagggacatttgcttccttcacaggcctgtgtgaacaagcaaaagtacccacctcctcggtcacccacagagccaccaaagattccatgtcccagagcttcccatagcagacctgaaaagtccatgacctgagctttggccatggtagtggagtggaacaggaaatagtccagcagaggagtgtgggggaagggggcaggagaggcacaagaataagggagacctggactctgcctttttgggaaaaggaaccaagctcatagcaatttggctgataacacaatcagatttttccaggttaagcttcctttctgttatactttcatcattgtgatgctgtggtagaaagtaaataacagtagtggctcagtcatttaatctttcccctctataacacaacttacttgaaatttaaatcaagaaaaaatttctgacgctgagctaggttggtggcatgatatgccaggggtcagtgggggagcttgcttctgagccccctgttgtctgcctggagtcctgcttgtctttcccagctgtgctgagtggctcttctgtctccctggggtccctggcacatctgctttcccagctctgtgaccttaccagttctctcctcagcccttggtggtttgggagctgaatatatgttttaaacttttacataaacaactcaacctgttgcctctcacttccctccatcactgtggcttttaaaactcatgtattttgactcaagtgaaaaaaacacaaaaatccctcatcccagctaggttttgccccctgccctataagagagctatttccccctttctttcctttgaattcttctccaacaccatcccttcattcatactgccctgtgatacacttgaagctgtgttgattggacagacgttcatcagctaacttacctttacttggcaagatggtaaaatagtaacttagtgatgttactaaagtctcgaccattcacctttccatactgaaggaaaggtaaaaaggcttcttctatgggaaattatgcttgacttgcatactctagtttgatgaggataaaaagaaacatgtaattgcagtggtgtttacaactaattgatcacaaccaatcatagatttctttgttccttctccactctcaacacttcatttgactagaaaaaaaaaatgtattcaccaaggaacaggacccaatttgttcagacttttgttaagtttctttactaaggcaatttttgaaacaccagttactatgggatggtgggaatttttcatgcttaagaaatagagacttaggaacaaagaaacatctttctggagaagatgctaatgggaagttacctaaggcttgatgcttggttcaaccttatttaaaatttttataaatgacctgaaagtaggattttacagtgaaatcaaatgtcactacttccaggcagtgaaaggtaatctagaagaggtttaaaaaacacaaaaccggtcgggcacagcggctcacgcctgtaatcccagcactttgggaggccgaggcggggagatcacgagttcaggagatcgagaccatcctggccaacatggtgaaactttgtttccactaaaaatacaaaaattagctgggtgtggtggtgggtgcctgtagttccagctactcgggaggctgaagcaggagaatcgcttgaacccgggaggcagaggttgcagtgagccgagatagcgccattgcactccagcctgtcaacagagtgagactccgtctcacaacaaacaaacaaacacaaaaccacagaagggttactaataagcagggctgagaatactcagaaaactgacaggtgaggttcaacataatataaggaaatgtatttatggaagaattatcaactgatatgcctgaacactgttagaactcaggaaagaaacaagcattgctgagggggaggagagatcaatgtgctgctgtggccaaaagcctaattgccctgtgggcatcatcaggaagggcttttggagataacagagaacagcactttatacaaaaccatggatatgtcttgatcggattatctgtgtttctagtgaccttatttacaagatatatgataaagggaggaaaggtccagagaacagccaaaattatcaggggatggaggtatatccatatgaggacacatttttaaaatatagactctatcctgcaaagatgaaagcagaggggagttagatcaaatatccaatcaagagcaaggacccggtcctgtactactagctctagggctctatctcatagccttagtaaagaaagcacttctcatagcaaatcagaaatgtaaggagctcattgtctaagaagggatgccaccagaaactatacatgggtgcaggtttatgaggaatccttgcatgacggccttctacaaggaattatagaaaagtagggctacttggtaatatacaactgagagggtaactgtgtccctcaacaaactactccttagtgcctctttcaaaggcagaatgttgatctgaatggatcactggtcaagtatggcatctctaatgttcttgaagggggaggaaggagatctggtagctggaaaatataattattccacgttaggctcacctgaattggtttaaaatcatattctgattctcttctcatcccttcctcccctcacccaccatatacctctggcatccctccatgcaaagaaatgtcgaataggcatttcttggtataatttacctacacttgtgcttgtggggtgggagtaaaaacatatccagtaagtaccaaggctaacctcctaatggctggagctcagttaggtctctgggctctctaaaggagtccagagctcttgtccatgtcacaaatggagccttagaatttctgtctttccttatgtggcagctttggccattgtgtcttgaaattctccctcaggaaatgtgataggggatattatcccatgggattttagtaaaaatcagcttgcctaatttcatattcgtgttcataatgaagaaatgcgaagtggtggtagtcctcaggattaagtgtaaaggaaaatatgcaaggaaaaagtagcagtgtcagcccttttggactgcttatgatttctgccttagagctacaagacttggaacaagaaataacaatacctcaagaaaatgtctggagagatagcaccactgtccctcaaagacttcagccactgcacattaccaattcagctgtgaagcatttacaactgtattatctgtgattgtctgcatttcctgtttacatgcatgtgctggggatatgctttagtgtgtatggactagagtttaaatcctgtctttaactgggctgcaaggatggctatcaatcccaaattctgttttcaactcactggaataattaatctggtgttcctgatataaaacaggtgggttctattcacatgatggctgctctttaccatatatttcacctgaccctcattttgccatgggcctcaacctttatgtgtgctttttatggctctgaaaggactggctcccgtgtgtggaatatacaaggtataaacaccacccctcacatacccctgtaacttaaatgcttccatttaactcacttagattactttccccttagtggtaaacgggttgggggatgggtggtagtgcaaagaaggtagtttgaaatattgccatagtaatatgggaactttttattccaaccctttaccctggcttttttttctctcaatatttgcctaaaattctaaaatgagttatagtaaaatcataaaactatggaaacaactgaactttggtacacaagttagttcgatgacatcttgttatttgagaacagtaaaaggtgtgtcattgcctcatgatttatcatagtcattactaagggtttcagagagaatctggtgtgaagcactatcctttcagacactaaggcctttacctagttgctcccctaccttctgtcggaataggattattcccatgcacctctgggtaggtataggtagtagctattgaacggggattattttccccatggcacaaggggaaacactcttggataaccttcaacaatgaggctttgctaagtggccagacttgggatttgatcttcctcacttgttatttattaagtttaagccttattcagtatctctaattgcaatagatatagttcctgtgacttctaaaaaaaattcctgttaatgctgagacagtatcttttttgtcagtttattaatttttggtcaagatttagcctgagtcttaaagcatttatttgtggaatgccccactgaagtgtcttctccattggctaagtacatgtttaaagccatgggttttaatgtaagatactttcagtatctaattctgtttcccccactgagggtgctaaagagaattagaatctttactaagacatgctcaggaaagcttcacgagagaacagcttcaaaatcctccctatgacactgaatggtagtgaggaaagaattcttggggatgccagttacatacaatagccttattactgctaatcactgtcaataaaaggtcacttcattcacctctatttgaggaaaacaatgagaatgtatctgatgaactagaatccttgtcagtattgggaaattttaatgttgcaatatctagtcaaactttgagtgtactggttctgtgaaccacctaaaaaaacaaattaaatgtattaaaccataaaaaaaaaaaaaaaaaaaaaaaaaaaaaaaaaaaaaaaaaaaaaaaaaaaaaaaaaaaaaaaaaaaaaaaaaaaaaaaaaaaaaaaaaaaaaaaaaaaaaaaaaaaaaaaaaaaaaaaaaaaaaaaaaaaaagaaaaaaaaaaaaaaaaaaa

SEQ ID NO: 611 - DNA, 1642 bp, Human
  unsure 806: unknown base
  unsure 807: unknown base
  unsure 808: unknown base
  unsure 809: unknown base
  unsure 810: unknown base
  unsure 811: unknown base
  unsure 812: unknown base
  unsure 813: unknown base
  unsure 814: unknown base
  unsure 815: unknown base
  unsure 816: unknown base
  unsure 817: unknown base
  unsure 818: unknown base
  unsure 819: unknown base
  unsure 820: unknown base
  unsure 821: unknown base
  unsure 822: unknown base
  unsure 823: unknown base
  unsure 824: unknown base
  unsure 825: unknown base
  unsure 826: unknown base
  unsure 827: unknown base
  unsure 828: unknown base
  unsure 829: unknown base
  unsure 830: unknown base
  unsure 831: unknown base
  unsure 832: unknown base
  unsure 833: unknown base
  unsure 834: unknown base
  unsure 835: unknown base
  unsure 836: unknown base
  unsure 837: unknown base
  unsure 838: unknown base
  unsure 839: unknown base
  unsure 840: unknown base
  unsure 841: unknown base
  unsure 842: unknown base
  unsure 843: unknown base
  unsure 844: unknown base
  unsure 845: unknown base
  unsure 846: unknown base
  unsure 847: unknown base
  unsure 848: unknown base
  unsure 849: unknown base
  unsure 850: unknown base
  unsure 851: unknown base
  unsure 852: unknown base
  unsure 853: unknown base
  unsure 854: unknown base
  unsure 855: unknown base
  unsure 856: unknown base
  unsure 857: unknown base
  unsure 858: unknown base
  unsure 859: unknown base
  unsure 860: unknown base
  unsure 861: unknown base
  unsure 862: unknown base
  unsure 863: unknown base
  unsure 864: unknown base
  unsure 865: unknown base
  unsure 866: unknown base
acacccagagagcgcccctcgttaggacagaaccacggtgcccagagccaggaagccgccctcctggcgcccagcatctgagcttctacacgtgatgggcgggctcaggagaggacagggagtcgtggtggaagttccacagctggccgcgtgggggggcccttgcaccgcactgccgcctcctgactgcccctatccccgcagcccctgtgccggatttcatttccctcctctctcccagggtacctggccccagcactctcccatctgttcttcaggaaccgactcctctccagttgcaacaccagggagaaaggggcctccacatgcccaagtacccctgcaggatgaagggcaggccggcccttgatgtgccatttctgaataatagtcactgccgccgagtctaggatgtcctgttctaactcagccctgcctcggatgcaccaccgatctgtgcagagtgggtgtgggagtgtgggtgagggtcgaaatgccaaaggtctactttccagaatcaagtgccttctgcaaatcatgttggaaaagtccaaacctggagatgtccctgtgcctccgcccctacccaccccttttccttcagctgtgttaggaaggagaagttttcagaaccctctaggctggtggctttcaaacttcagaccatgatctgcagcaagaaacgtgccttccatcataaatcagtccatttgtttacaactgtgttccaagcaggtttcataaagaaattcttaaccttagaacctcggatatcctctatgttttagttttcatttttttaaaannnnnnnnnnnnnnnnnnnnnnnnnnnnnnnnnnnnnnnnnnnnnnnnnnnnnnnnnnnnngaacaaatgcctttttaaaccttttaagaacatttttaaaatgtctttttctatgtcaaatgtaacgtttatttttttaaacaataaaattgatttgccaaaaaaaagtagtagaaaggttatttccaaccatttaaaacaactataacatcatttcacattcaactgacaaccgcagcttaaacttgagaatggacaagggaataataatatacatttttctttttcattatttcgtctttatcttatgcatcagtattcttacgaaggacctttttttcttccattcgagattgtgtgctttatgaactgaacagatgttgcctttcatgtgattaaacaataattttttcctgctcatacttcttaaccaattcctacctgcctctcatcatgaatcattgaagataattctccagtcatgcatttaaaaaaatctacttgaaagaaaaggtcaaagagaatttttgaattgaccacttaatttaaaatatgttgccatcaattagccagtgctatctacttttctcctaagaacagaaagaaatgactccaatgattttactttctttgcttggcttaatatccgtggatcttgctatcttctcttgagaagaacttggcctttcattctaatgactcacaaaagaaaaggcaatgacacctggggcacatatgtttttctaagtcacttgaaaaattctctttgaccttttctttcaagtagatttttttaaatgcatgactggagaattatcttcaatgattcatgatga

SEQ ID NO: 612 - DNA, 2377 bp, Human
atctttatgcaagacaagagtcagccatcagacactgaaatatattatgatagattatgaagaattttctctgtagaattatattcttcctggaacctggtagagtagattagactcaaaggctttttcttccttttcttactcctgttttttccactcactcttcccaagagatttcctaaagcttcaagcttaataagcctaatagtgaaaaataactgaatttaatggtataatgaagttcttcatttccagacatctttaattgatcttaaagctcatttgagtctttgcccctgaacaaagacagacccattaaaatctaagaattctaaattttcacaactgtttgagcttcttttcattttgaaggatttggaatatatatgttttcataaaagtatcaagtgaaatatagttacatgggagctcaatcatgtgcagattgcattctgttatgttgactcaatatttaatttacaactatccttatttatattgacctcaagaactccattttatgcaatgcagaccactgagatatagctaacattctttcaaataattttccttttcttttataattcctctatagcaaatttttatgtataactgattatacatatccatatttatatttcattgattccaagacatcactttttcaatttaacatctctgaaattgtgacatttcttgcaactgttggcacttcagatgcagtgtttaaaattatgcttgaataaatattacactaatccaactttacctaaatgtttatgcatctaggcaaattttgttttcttataaagatttgagagcccatttatgacaaaatatgaaggcgaaatttaaggacaactgagtcacgcacaactcaacatggagcctaactgattatcagctcagatcccgcatatcttgagtttacaaaagctctttcaggtccccatttatactttacgtgagtgcgaatgatttcagcaaaccctaacttaactaacaagaatgggtaggtatgtctacgtttcattaacaaatttttattatttttattctattatatgagatccttttatattatcatctcacttttaaacaaaattaactggaaaaatattacatggaactgtcatagttaggttttgcagcatcttacatgtcttgtatcaatggcaggagaaaaatatgataaaaacaatcagtgctgtgaaaaacaactttcttctagagtcctcttactttttattcttctttatcatttgtgggtttttcccccttggctctcactttaacttcaagcttatgtaacgactgttataaaactgcatatttaaattatttgaattatatgaaataattgttcagctatctgggcagctgttaatgtaaacctgagagtaataacactactcttttatctacctggaatacttttctgcataaaatttatctttgtaagctaactctattaatcaggtttcttctagcctctgcaacctacttcagttagaattgtctaatactgctctattaatcaggtttctaccctctacaacctacttcagttaaaattgtctaatacagcaatatttaaaaaaaaaacactgcaattgtcaaggatggaaaatgtgtgatttgtgtaaacaatttttaccaactttacattttcctacagataaatgtgaaattttgataagaagtctacgcaatgacaagtacggtacataaattttattaagaatattgagtataaagtactttaattctaaattataagaaaatatacatttgcacatattaatatagaaattcattttgtgtatatttaacatagcttttaaactattttacattagctacttcattatggtttcttgaacttctgaaaaaaattagaaatgtattaaacttatcagtaacataaaaacttattttgtttcacctaacgaatactgcgtttgtaaaaataaatttaatatagaatatatttttaaattaaatatttgaatataaaatagctctaagaaagaagcaaattatcactgaacatatttcttattatttctggctttgaattatacgtaacttaaattgtcttaaatgatacagaatattggagaatatgatactttcacataatatactatgaacctgttcatataactctgattgactactaacttctgttttatgtatttattaaagagctgacactgtagtttgtggtgagatgtttatttttctaacagagcttataacagttaggacaaggcatttaattaatgcatcattctgtttagtagtaggtgttaatcaatatgaaattctctgttttaaaataaaaatgtaaaaatctaaaaaaaaaaaaaaaaaa

SEQ ID NO: 613 - DNA, 7028 bp, Human
caaactcctagtggggagccggcggcttgtggacgtgatggatgtgaacacccagaagggcacggagatgagcatgtcccagtttgtgcgttactacgagacgcccgaggcccagcgggacaagctgtacaacgtcatcagcctagagttcagccacaccaagctggagcacttggtcaagcgtccgactgtggtagacctggtggactgggtggacaacatgtggccccagcatctgaaggagaagcagacagaagccacgaacgccattgcagagatgaagtacccgaaagtgaaaaagtactgtctgatgagcgtgaaaggttgtttcaccgacttccacatcgactttggaggcacttccgtttggtaccatgttttccggggtgggaagattttttggctgattcctccaacgctgcacaatttggcgctgtacgaggagtgggtgctgtcaggcaaacagagtgacatctttctgggagaccgtgtggaacgatgccaaagaattgagctgaagcagggctacacatttttcatcccttccggttggatccatgccgtctacacccctgtagactctttggtgttcggcggaaacatcctgcacagctttaacgtgcccatgcagctgcggatctacgagatcgaggacaggacgcgggtgcagcccaaattccgttaccccttctactatgagatgtgctggtatgtcctggagagatacgtgtactgtgtgacccagcgctcccacctcactcaggaataccagagggagtcgatgcttattgatgccccgaggaagcccagcatagacggcttctcttcggattcctggctggagatggaggaggaggcctgtgatcagcagcctcaggaggaggaggagaaggacgaggagggcgagggcagggacagggcacccaaaccgcccaccgatggctccacttcacccaccagcacgccctctgaggaccaggaggccctcgggaagaagcccaaagcacctgccctgcgattcctcaaaaggactttgtctaatgagtcggaggaaagtgtgaagtccaccacattggccgtagactaccccaagacccccaccggctctcccgccacggaggtctctgccaaatggacccatctcactgagtttgaactgaagggcctgaaagctctggtggagaaactggaatccctcccggagaacaagaagtgtgtccccgagggcatcgaggacccccaggcactcctggagggtgtgaagaacgtcctgaaggagcacgcagatgatgaccctagtctggccatcactggggtccctgtggtgacttggccaaagaagactccaaagaaccgggctgtgggtcggcccaaggggaagctgggcccggcctccgcggtgaagttggccgccaaccggacaacggcaggagctcggcggcgccggacgcgatgccgcaagtgcgaggcctgcctgcggaccgagtgcggagagtgccacttctgcaaggacatgaagaagttcgggggccccgggcgcatgaagcagagctgcatcatgcggcagtgcatcgcgccagtgctgccccacaccgccgtgtgccttgtgtgtggcgaggcggggaaggaagacacggtggaagaggaggaaggcaagtttaacctcatgctcatggagtgctccatctgcaatgaaatcatccaccctggatgccttaaggtgagtggcccagtggggacaggtggtgctgacgctctggggcaggtagggttgctggagatgctggtgagatggtgggatgcaggtcgtgcagtgaattcctggaggacccctgagtctgggtgatcctgtgtgtcaagggataagcccggggcaaggagggcctggagtacctcagagacccagtgtcatcaaaggaataaacacacccccacctcccaggatgtcagaaccagagagggtttccagagcctcagcggatggcaaacacaggctgcttgtttgtagctgggccagagggagggcctccaggtggctccaggcttctgggagaacaaggccccacaccacacttcttcccccagcacccagtagagtcctctgcagagtcctttctgcatgccaggcgctgagctggtggctttacctgggtcatacccccccagtgagatgggcacactaacttttatggccgagggcaccagcccacagagacggagtgtcttgcccagggtcccagagaagcaaaggggctcagcctctgaaccctggcctggatccacagctgcccgtctctgccagcctctgcagctgtgttttcttttggctggaaacgggatagatgtgacgttggggagggggtgctgctgcttctggaagacgtggcgtcacagagccttgtgcccgtgggccatcttctccgcccgtccctcttctgagtcctggtgttccccgcagattaaggagtcagagggtgtggtcaacgacgagcttccaaactgctgggagtgtccgaagtgtaaccacgccggcaagaccgggaaacaaaagcgtggccctggctttaagtacgcctccaacctgcccggctccctgctcaaggagcagaagatgaaccgggacaacaaggaagggcaggaacctgccaagcggaggagtgagtgtgaggaggcgccccggcgcaggtcggatgagcactcgaagaaggtgccgccggacggccttctgcgcagaaagtctgacgacgtgcacctgaggaagaagcggaaatatgagaagccccaggagctgagtggacgcaagcgggcctcatcgcttcaaacgtcccccggttcctcctctcacctctcgccgaggccccctctaggcagcagcctcagcccctggtggagatccagtctcacttacttccagcagcaggtgctcccacgacgcacgccctcctgaggccccggggactggcgagtcctgggctgtcccccaccccaccccgctggtcctccaccccactgctgcctctcctgaggcttcccaggtctcggccccagatctctggctcgtggttctggcttggggcctgggaagctgtctgtgcctagagcctctgttggttgggatggaagctgtgagtccagggaacctctgaggagcctggtggccctgctccacccacgggccgtgctgtcaccagccacaaggtggcgccaggagtctctcccagctctagccattcctgctgggccggggattcccacagggctgtgctccagaactggctcccagagccgaggatgatttgaatgggcggctgcacatctccaggtctgtggggtgggaggtcagttgggtgggaacagttcaactgtactcctacttccagcttcttccttgaaagctgcaggcagggctcgcccgtctgtcggtcagacgtggagatggcatttgtggggaaggcctccctccagcccctcctctggagactgtggactcgtggtggggtggggtgtcgaggagaccaaatcccacgagcccggggagcaagctctgcgtcctttctttttcgtgacagctcaaacctggcaaagaagataagcttttcaggaaaaaggtaccatcttcccctccctcctgtgccccaggcctgagcggttagagctgcaccgcagctccctgggccacagtcccgtggcaggggggcgggaggccttgggcgggcgcagccctgagccccagaggctgacgcgtctccgctctcgccctcagcggcggtcctggaagaacgccgaggaccgcatggcgctggccaacaagcccctccggcgcttcaagcaggaacccgaggacgaactgcccgaggcgccccccaagaccagggagagcgatcactcccgctccagctcccccaccgcgggacccagcaccgaaggggccgagggcccggaggagaagaagaaggtgaagatgcgccggaagcggcggcttcccaacaaggagctgagcagggagctgagcaaggagctcaaccacgagatccagaggacggagaacagcctggccaacgagaaccagcagcccatcaagtcggagcctgagagcgagggcgaggagcccaagcggcccccgggcatctgcgagcgtccccaccgcttcagcaaggggctcaacggcaccccccgggagctgcggcaccagctggggcccagcctgcgcagcccgccccgtgtcatctcccggcccccaccctccgtgtccccgcccaagtgtatccagatggagcgccatgtgatccggccaccccccatcagccccccgcctgactcgctacccctggacgatggggcagcccacgtcatgcacagggaggtgtggatggccgtcttcagctacctcagccaccaagacctgtgtgtgtgcatgcgggtctgcaggacctggaaccgctggtgctgcgataagcggttgtggacccgcattgacctgaaccactgcaagtctatcacacccctgatgctgagtggcatcatccggcgacagcccgtctccctcgacctcagctggaccaatatctccaagaagcagctgagctggctcatcaaccggctgcctgggctccgggacttggtgctgtcaggctgctcatggatcgcggtctcggccctttgcagctccagttgtccgctgctccggaccctggatgtccagtgggtggagggactaaaggatgcccaaatgcgggatctcctgtccccgcccacagacaacaggccaggtgagttgccaggctgggggtttctgtgggggtggggtgagcgagctagactgttggatctgcttttaccctcagaccccagctgttccccaaaggacatagggatgagtctctgctgccatgttctcagtttgcttcaggcacagaggggatctgggaggaggcaggggctcctgtgcacacgtgagactcgctcctggggctccgcgtgcgtctctctgctttcctgttgactcgctcatggggctctgcgtgtgtctcactgctttcttattgactcgctcatggggctctgcgtgcatctcacttcttttctgttgacttgcccctcgttggtttcaagcctccactgccatcgggatcagtgtggttgtgcaaaggcttccaggatggcacctccccctggactgggctggactgcctaggtccgtgcttctcgccaagccatggggatcggagatgctgcgcagcctctgcactggttggctgatgactactgggtggaatgtgggcatagtgtttctaggtcttttagtttttcaagagaatctgaaaatctaagttttgatgtggagtctgatttttcactgttggaattatgattttgggaggaagcagtttataactaaatgaaatctgagtgttctgtctggctggtgggccttttagagtgtcatgtcagcatgaccaggcctcctcggtcagattgacgggttgccccctccttcctgccccaccaggtcagatggacaatcggagcaagctccggaacatcgtggagctgcgcctggcaggcctggacatcacagatgcctccctgcggctcatcatccgccacatgcccctgctctccaagctccacctcagttactgtaaccacgtcaccgaccagtctatcaacctgctcactgctgttggcaccaccacccgagactccttaaccgagatcaacctgtctgactgcaataaggtcactgatcagtgcctgtccttcttcaaacgctgtggaaacatctgtcatattgacctgaggtactgcaagcaagtcaccaaggaaggctgtgagcagttcatagccgagatgtctgtgagtgtccagtttgggcaagtagaagaaaaactcctgcaaaaactgagttagtccaaggataagtatgtaaatacggggcgggctctgggaggggagagactttacaaaaatgagggcttttattttccatttggaacgtgggacaacagaccacaacgcaattccattttgcaagtctttccaagggagaagctgttcaaccacccgtttgggggatgagtgagccgacactttcctttggtctttctgaatcgtaactgcactgctttctggaccatttctaaggcggcctttacaagaagacattcctgtcggagaggagggtggacttcggagaaattctcatactgaagcatgagcttaggagtttctgttagtggtagtggtgttttggacacttcattccttgcaacaccgaggttttgggtgttgacataaagtggaccacacaccacatctgctgccgtcttgacacttttttttgtttggttggttttgttacatcttacattatgcagaactatttttgtacaaattgtttaaaagttatttatgcaaggtttgaatgcataccagtgtttttattgttttgagattgccaattttcctgatttccttaaggtaggagagaatttaacgtgtacttcatcgacacaacccatctacaaatgtgcccagatctaacaaagtaggctaagaccttccacttaaaagcatgtttaactggaagttgagagtctgctttgtacctcaagagttacatgagcatgttgtggataaatgtaaattatagtcaaagtaagatactctgccaagtttcctctgtagagaattcacttttctcaaattttaaaatttcgacttcagcctttgcactcaggaggttctgctccagcatgagctcttgtacttacatagatctaatttatacagtgagtcaagacgtagaataaatgctcccacatagcctttcttttgcttttgcttctctcctctgaagtgtgagttgagttctcatttaggtttgtaacatggctatttcctagttgtaaagttctgcatttataagtgccattgttgtaaggtggtgtttcctagaccttccctgatgcgattttacctttgttgaatttgtataaacaattgtacaaaaaaaaccaaaaaaaaaa

SEQ ID NO: 614 - DNA, 3522 bp, Human
gggggatagaggtgaccgggccagtgccctggggctctggccatgaagtctcggcagaaaggaaagaagaagggcagcgcaaaggagcgggtttttgggtgcgacttgcaggagcacctgcagcactcaggccaggaggtgccccaggtgctaaagagctgtgcagaatttgtggaggagtatggagtggtggatgggatctaccgcctctcaggggtctcctccaacatccagaagcttcggcaggaattggagtcagagcggaagccagacctgcgtcgggatgtttacctccaagacattcactgcgtctcctccctgtgcaaggcctatttcagagaactgccggatcccctgctcacttaccggctctatgacaagtttgctgaggctgtaggagtgcaattggaacctgagcgcttggtcaagatcctagaggtgcttcgggaactccctgtcccaaactacaggaccctggagttcctcatgaggcacttggtacacatggcctcattcagtgcccagaccaacatgcatgctcgcaacctggccatcgtgtgggctcccaacctgctgaggtctaaggacatagaggcctcaggcttcaatgggacagcggccttcatggaggtgcgggtacaatccatcgtcgtggagttcatcctcacacacgtggaccagctctttgggggtgctgccctctctggtggtgaggtggagagtgggtggcgatcgcttccagggacccgggcatcaggcagccccgaggaccttatgcccaggccactgccttatcacctgcctagcatactgcaggctggcgatggacccccacagatgcggccctaccatactatcatcgagattgcagagcacaagaggaaggggtctttgaaggtcaggaagtggaggtctatcttcaatttaggtcgctctggccatgagactaagcgtaaacttccacggggggctgaggacagggaggataaatccaacaaggggacactgcggccagccaaaagcatggactcactgagtgctgcagctggggccagtgatgagccagaggggctggtggggcccagcagcccccggccaagcccattgctgcctgagagcttggagaacgattctatagaggcagcagagggtgaacaggagcctgaggcagaagcactgggtggcacaaactctgaaccaggcacaccacgagctgggcggtcagccatccgggctgggggcagcagccgtgcagaacgctgtgctggtgtccacatctcagacccctacaatgtcaacctcccgctacacatcacctctatcctcagtgtgcccccgaacatcatctctaacgtttccttggccaggctcacccgtggccttgagtgccctgctctacagcaccggccaagccctgcctctggccctggccctggccctggccttggccctggccccccagatgaaaagttggaagcaagtccagcctcaagtcccctggcagactcaggcccagacgacttggctcctgccctggaggactcgctgtcccaggaggtgcaggactccttctccttcctagaggactcaagcagctcagaacctgagtgggtgggggcagaggatggggaggtggcccaggcagaagcagcaggagcagccttctcccctggggaggacgaccctgggatgggctacctggaggagctcctgggagttgggcctcaggtggaggagttctctgtggagccacccctggatgacctgtctctggatgaggcacagtttgtcttggcccccagctgctgttccgtggactccgctggccccaggcctgaagttgaggaggaaaatggggaggaagttttcctgagtgcctatgatgacctaagtccccttctgggacctaaacccccaatctggaagggttcagggagtctggagggagaggcagcaggatgtggaaggcaggctctgggacagggtggggaagagcaggcatgctgggaagttggggaggacaagcaggctgagcctggaggcaggctagacatcagggaagaggcagagggaagtccacagccacctcagccagaggagatggagcctgaggggcagcccagtccagacggctgtctatgcccctgttctcttggcctgggtggcgtgggcatgcgtctagcttccactctggttcaggtccaacaggtccgctctgtgcctgtggtgccccccaagccacagtttgccaagatgcccagtgcaatgtgtagcaagattcatgtggcacctgcaaatccatgcccgaggcctggccggcttgatgggactcctggagaaagggcttgggggtcccgagcttctcgatcctcttggaggaatgggggtagtctttcctttgatgctgctgtggccctagcccgggaccgccaaaggactgaggctcaaggagttcggcgaacccagacctgtactgagggtggggattactgcctcatccccagaacctccccttgtagcatgatctctgcccattctcctcggccccttagctgcctggagctcccatctgaaggtgcagaagggtctggatcccggagtcgtcttagtctgccccccagagaaccccaggttcctgaccccctgttgtcctctcagcgcagatcatatgcatttgaaacacaggctaaccctgggaaaggtgaaggactgtgattaggaccacagccctgggcaaaggggaccagcaagttgtcttgaatctccagggttcctgactagctgtctcctctgcagcatgagcagctgtagtgcccaactctataggctttggccctccagcttctctctttgactgtgggaggcactgccttggttggtttacctgaacttgtctccgacacaaagcacttatctcttaggagattcccaagaaagtcaacaagatcttgttcccagggagtgggtcattggccaaagggaacataaggtaggcagaaaacttaaaagagtttgttaaagtgaagactggagaaattcctcccttcctctgagctgtgaatctctcttcatgaaagccaaaggtagagacagggaggacagggccaggttagggccttccacacacaaacacttctagagttgcccattcctgttatgttcttggaccctaagatacctcctgtcccttttaaatccagattaagagaaacgtccaggaagagctctttgaagccctcaatatttgttggagggactggactcctctccagctccccaccctctgcctccagtcaccatgtgcaagagaggtcctgtacagatctctccgggctctcctttctcctttggaataacttgttcctatttcaggaaagggaaatggtgtcactcaggccctgggactgcttctccagccaggctggggccacaggtcccactctagtgaaggtcaatgtctcagaataaaagctgtatttttaaaaaaaaaaaaaaaaaaaaaaaaaaaaaaaaaaaaaaaaa

SEQ ID NO: 615 - DNA, 440 bp, Human
  unsure 136: unknown base
  unsure 137: unknown base
  unsure 138: unknown base
  unsure 140: unknown base
  unsure 144: unknown base
  unsure 145: unknown base
  unsure 146: unknown base
  unsure 148: unknown base
  unsure 155: unknown base
  unsure 181: unknown base
  unsure 183: unknown base
  unsure 184: unknown base
  unsure 185: unknown base
  unsure 187: unknown base
  unsure 189: unknown base
  unsure 192: unknown base
  unsure 193: unknown base
  unsure 194: unknown base
  unsure 201: unknown base
  unsure 213: unknown base
gatgcttcaacaactagggtctacacttaatatactgacatctaaggatgcggccaagaaaagctgtaattaggctgaattttattgccaaagttgttcttttttcatttagtcctttaataaaagatgatcttcnnnangttnnngnaaggatngtctcgatttcttgacttcgtgatcngnnngncntgnnntcccaangtgctgggattncaggtgtcagccaccgcacccggcctcaaatacatttttttaatggccttgtctttcctggttttaggcccttttccacaatttctgatggaaatacagaaaccttgccatcattcttactgctggtttgcatctcatttatggtgtatctgggatttcttctcatgaacagaaagattcagtggctgttatatgccttgtcaatttaatgtattgccctatcctct

SEQ ID NO: 616 - DNA, 3804 bp, Human
  unsure 343: unknown base
  unsure 344: unknown base
  unsure 345: unknown base
  unsure 346: unknown base
  unsure 347: unknown base
  unsure 348: unknown base
  unsure 349: unknown base
  unsure 350: unknown base
  unsure 351: unknown base
  unsure 352: unknown base
  unsure 353: unknown base
  unsure 354: unknown base
  unsure 355: unknown base
  unsure 356: unknown base
  unsure 357: unknown base
  unsure 358: unknown base
  unsure 359: unknown base
  unsure 360: unknown base
  unsure 361: unknown base
  unsure 362: unknown base
  unsure 363: unknown base
  unsure 364: unknown base
  unsure 365: unknown base
  unsure 366: unknown base
  unsure 367: unknown base
  unsure 368: unknown base
  unsure 369: unknown base
  unsure 370: unknown base
  unsure 371: unknown base
  unsure 372: unknown base
  unsure 373: unknown base
  unsure 374: unknown base
  unsure 375: unknown base
  unsure 376: unknown base
  unsure 377: unknown base
  unsure 378: unknown base
  unsure 379: unknown base
  unsure 380: unknown base
  unsure 381: unknown base
  unsure 382: unknown base
  unsure 1239: unknown base
  unsure 1240: unknown base
  unsure 1241: unknown base
  unsure 1242: unknown base
  unsure 1243: unknown base
  unsure 1244: unknown base
  unsure 1245: unknown base
  unsure 1246: unknown base
  unsure 1247: unknown base
  unsure 1248: unknown base
  unsure 1249: unknown base
  unsure 1250: unknown base
  unsure 1251: unknown base
  unsure 1252: unknown base
  unsure 1253: unknown base
  unsure 1254: unknown base
  unsure 1255: unknown base
  unsure 1256: unknown base
  unsure 1257: unknown base
  unsure 1258: unknown base
  unsure 1259: unknown base
  unsure 1260: unknown base
  unsure 1261: unknown base
  unsure 1262: unknown base
  unsure 1263: unknown base
  unsure 1264: unknown base
gctcatttgggggcatgaatgttctccttactaacctctcatggagtcatgtgataacagccatgtcatgtgtatggatgccaccattcttgaatttctgctagaaataagtaggttgctatgcacttagagtcatctttgcaagggactcattccaaaccaattccaatcgacctgaaagtcccttgcactaaagaaatgtgatttttttttaacccaaggagaaagttggttgtaacaatttttcaccagaattagcaatctgatagaataggcttttttaacaggaattttaaactggcggtgccagttgcagtgaaggtgaagtggctattgctttatnnnnnnnnnnnnnnnnnnnnnnnnnnnnnnnnnnnnnnnncctgaagatagagcgttgaacaaacccaatggtcttggccctcaaaaagctttatgtgacatagagcatccagctcgacaattagcaaacccctgatattattcatggacttgacatgaggtttggactattcatgagcaacagcagaaggtccatgacccctacaaatttacatttttctatggcccatatttgaaaacctcacattcggagcaggccactttatattcgtgagtgatcccaagctcactgaccaacagaaaagatgctaaaaaaatgtgtcctatcatgtgcctgctccaactgatgggtaatgtctgcctttaagccccagaatggattctccaggcacagtgtggaagagtgctgtggttgattagcaatgtctgccttgggtgaggaaaggggaacactcctcaagtgcctcctactgtcatctccattcagcctagcaccacatccccatgtagaagtgttgtcttctactgcttgccacgtacaagtgtgaaatgccaaggtgagactcgtacacttggggatttgcaatggtttttacccctcatgaaggtcagaggtggactatttgtacacatacacacatgcacaccctctcacgtcctccagaggctgaaagaccatcagcatcttggtaactgccatgcatgagcagcaaggacagccttccataatccatgccccatttcctctggaagcctggaaacttttcatttcctgttccttgctaattaacatctaaacatgcttctcatttccagccattgctgatgcttctcagttgaagtttgagccacatccctcttacagctagtgaatgagttggtagcagatactgtatnnnnnnnnnnnnnnnnnnnnnnnnnnaggggagggtgggatggggtgtgggtaagttttgccttttgttttgtttttgatgccgtatatagtgaaggggtgaggatattctaaacaaacaaaaattgaataatttattcacagaaactattaagattgtattgtaaagctcacagcaagctcagtgggcagcagctgcaacatctcaccggggaaattattttatttaacgtgagtgagatgtgggccggagaaggtagctgaagctatttataaaacgttgtgtaccttcttccgagctctctcccctttgtgaagggcgcagcaactatacccttgatggatggagatttatgcaatgtgttttactgggtagagtgacagaccttggctgtccctggaattgagaatctggaccttatttccaggcagagaacactgtcctcagaaatgggacttctgataatgaaacaggttgtccaacattttctaatacgcattctacagaacacaggttccaggaggcatcaggttggtgtgatgcagactaagggttttgtggtcaaatatccttaagaaacaaagttaagtcagtttcctttctgcaaggacttttcagccttcaatgtgtgctgtgcatggtgaatccccaaaaataatccttgagtctgtagcatttcctgaacttacatgaccaggatactctattttgcagatcaccccacagagctagggttccaccgagtatactttgcttaggttgacttagcatatctgaggtcttcaaggataaaaactgccaccccaacacccttccattaaaaaaaaaaatacaaaatagcaccacagtctccatctggtttatagcaacagaggtactttatttaatgaagcaatggttctaatcctggatactgccacggactacaattctatccctcccagagggagtggaggaagtcttgggtggtgtggacagaaggaagagaggagagggtgagtggggtatagggcccagggtggctccctactcctcaggctcaaaaggatgctcagtgggaacagatgatctcttgatgagtgcttcttcagtttcatagtttggaatcgttcactgtgtgctttttggggggttttcaatggaaattcacgttgctttgcatttctgtgtccgtctttggtcagttgtgcaagcctgctcactgtcatgtgaagatggcctttcatctggcttctctctcttaagtgagaaagattgtccttcaggggacatgacatcaataggtttctggaatgagggactctttctccccgtgttttgctttgtgttcacattttcttttctaatggcattgaaactttaaaaaaaatggattcaactgtttttgcagaatgtagaaagtattctgtgtccttggttaaagaaatccacttgtgaagtgtgcctggaaaatgaaagtttgtgttttttaaagaggaatatttgaaactgctttctatgcatgcttagctggagaaaagtacaggcaggcgtcccatctcccagccacttctcaaaggtgctgctgtgttttaaagaccaggtacagccagggcagtatttgcaaggacattcctgcttactttatccctttggttggaaagctctagatgattcccgcagctcctccagaccccgcctccctgccctccccagctggtctgggaagaggtggtctgctgacctgtggtatctcagaggggacgttcctcctcctccctgtgcaccaggtgggctgcaccctcctgcctattcaggatgtggatgccacaggagagcagcaggcagtggaaacttcagttgcactggttctcctggtggcaaaggcatgaagcacaggggtcgattaatccaggctactagaaagctccagagcaaagtgtgcgggtcccacaaatgcttggctggtggggtctggatcagtgctgagatagagttggcagaagaagcagaggcactctgcttgctttcctagccagtcctcccctaacaacacaacacaacaacacacacaatctcagctgcgccattctgtgcaatcccagtgaccaaatcccttccttgcccacctctatgtcagcaggactgaccacatcactcccccgagttcccaccaccagcatttcctccaacctttttccatcacaaccagttagaaccctacaggcaacaaggccttctagaatccgcttaacccttggctgataacaggcaaatttcagtctgctacactttgttaggtccagaaggagctgcccatactactttcttatgagcatgctcagtatggcatatggacatgtaatgtcacatctttgtggagtgtgattttctttttttacatatttgtatgcagtagagagcctgttgtagaaaacgctccctgtatcttgctgtactgttaaagaaagctgaattccacattgccaacaaaagcgtgaaaatgttcatgaaccttcctccaggaaaagccattcaagcctgattatttttctaagtaacttcaattaaattgaagaaaaaagag

SEQ ID NO: 617 - protein, 170 aa, Human [sequence omitted]

SEQ ID NO: 618 - DNA, 378 bp, Human
  unsure 27: unknown base
  unsure 29: unknown base
  unsure 30: unknown base
  unsure 31: unknown base
  unsure 32: unknown base
  unsure 33: unknown base
  unsure 34: unknown base
  unsure 35: unknown base
  unsure 36: unknown base
  unsure 37: unknown base
  unsure 38: unknown base
tgactttcaatacttcccctgaaggangnnnnnnnnnnagaaatgtctgttttgaggaaagggctttgaattccccagatactgaacaatttgtgtttgtgactgatggagaatttcaggaatgaatgagaaagcctttgcgaaactatgcaacagtttacatcagtcatgtgaagtatttgtctaaaacagagcaaactgaagaccaaattattctcctgttgaggtccgtggatggcagatttaaagggaagaaccacaaaggcttgcaaagataggagaggctccatctctaatgcatgtagaagctccttacgggtgcccatcaagagcatagcttggaagccaccatgctgtgcggaactgcgtcagggcaaa

SEQ ID NO: 619 - DNA, 4576 bp, Human
gatccccgcccctgctgcccgccacgtccctcacgtaccactcggcagaggcgcggggaaacctggcgtactggctgtggcttctctagcgggactcggcatgaggctggcgcggctgcttcgcggagccgccttggccggcccgggcccggggctgcgcgccgccggcttcagccgcagcttcagctcggactcgggctccagcccggcgtccgagcgcggcgttccgggccaggtggacttctacgcgcgcttctcgccgtccccgctctccatgaagcagttcctggacttcggatcagtgaatgcttgtgaaaagacctcatttatgtttctgcggcaagagttgcctgtcagactggcaaatataatgaaagaaataagtctccttccagataatcttctcaggacaccatccgttcaattggtacaaagctggtatatccagagtcttcaggagcttcttgattttaaggacaaaagtgctgaggatgctaaagctatttatgactttacagatactgtgatacggatcagaaaccgacacaatgatgtcattcccacaatggcccagggtgtgattgaatacaaggagagctttggggtggatcctgtcaccagccagaatgttcagtactttttggatcgattctacatgagtcgcatttcaattagaatgttactcaatcagcactctttattgtttggtggaaaaggcaaaggaagtccatctcatcgaaaacacattggaagcataaatccaaactgcaatgtacttgaagttattaaagatggctatgaaaatgctaggcgtctgtgtgatttgtattatattaactctcccgaactagaacttgaagaactaaatgcaaaatcaccaggacagccaatacaagtggtttatgtaccatcccatctctatcacatggtgtttgaacttttcaagaatgcaatgagagccactatggaacaccatgccaacagaggtgtttacccccctattcaagttcatgtcacgctgggtaatgaggatttgactgtgaagatgagtgaccgaggaggtggcgttcctttgaggaaaattgacagacttttcaactacatgtattcaactgcaccaagacctcgtgttgagacctcccgcgcagtgcctctggctggttttggttatggattgcccatatcacgtctttacgcacaatacttccaaggagacctgaagctgtattccctagagggttacgggacagatgcagttatctacattaaggctctgtcaacagactcaatagaaagactcccagtgtataacaaagctgcctggaagcattacaacaccaaccacgaggctgatgactggtgcgtccccagcagagaacccaaagacatgacgacgttccgcagtgcctagacacacttgggacatcggaaaatccaaatgtggcttttgtattaaatttggaaggtatggtgttcagaactatattataccaagtactttatttatcgttttcacaaaactatttgagtagaataaatggaaactgaattccatttgtgcccgttaaacctcctaaaggatgaaattgcacctattttacacttatattttcacagttaattgaacatatttttaaacaactgtagttttgggcaacttttcactttgtggtagacttcagaagtgtggaaatcttcgggtttctataggaaactagttttttttttttaagaaatactttcatttatgtttgctagaaacattttctaaatgatagtgattagctggttagccatcttcctgttatttggaggagttctgccatcttttattcggtagtgacagctgtaatatggtcttcatgtttatcagtgacttgactacaagtaaagcagaaaacagttggcctgtaatcacagaaccagccacccttcggcgtctacatgcattgtcttagctctgaggttaatttaccatttttaaattttattgtaaagaagtgtaatgactagctctctgtggatctatgccaaaatcatgggccatcttttctaagtgtacttctgattaatgcaaggggaaatttttatactgaaaacaaacaaacaaactagcagctactaaaatagagaagaaattgagggcaaagtaatatgtctccaaaactgaactgattgcttgttgagattacctagaaagcttttggaaaaaaatagagcttttctgcatcctactccagatacactgaatcggaatccctagggctagagcctagaaatctcactttttaaaatgcttccaaggtaagtctgatgcctaccctaggttgggaaccactctttcaaagtaaacagtgatgacacagcatttgctaaagtaacatctgtaggttttggtttccacctatttaaagtcagatttatagactcgaggagacagaaactgaatcccacacctggtgcaattagaagcataattagaagcagaagaacaaaatgccacgtaaccaaagcatcagagccatcattgcacgtgtctttttttcttttttcttttttttttttcaagacagggtctcgctcttttgcccaggatggagtacagtggcatggtcaaggctcactgcagcttcaatcttctgggctcaagtaatccttccacctcagcctcccatatagctggaactacagttgtgcactaccacacccagctaattttttgatttcttgtggagatgaggtctcagtatgttcccaggctagtgttgaactcctgagctcaagaaatcctcctgcctgagtctctgaaagtgctgggattacaggcgtgagccaccacacatggcctattgcacaagtcttgacaaacaacatatattttctaaaactatccagatttcattatcagggaaaagtttgcttaggtttattacagcagtccttggcatttgtatggtaatttgtactttacaaatactttgatatattataactctattggtctttgaaacaaagcgatacagtgtaggtggtatcattctctttctcactcagtgtggcccagagttgctcagaattggagcagagcctgagacgtatctgcagatcctgtcatcagctggcaagtccaggagactgtgtcatttagagactgtgttgttagttatccctcaacatcttctaaggtggcaggaaataatattggaaataacattttaaagtaaaaattttaaagtttaaagaagagttttgccacttaaacaggggagctttgtctggaaaatacactgagttgaaacacttcatccttggaaggattatataagatgaacagttgtgataaatgtgtagattagagggatgtgaatgggcagttagtccagtgccctcatttaagaggccaagatcctgattcagaggaggcatcctttgcccagagctgcttagctaatctgaccaaatgttgggaaaaatgtctcacctaacccactattccttaattatggattttgtgaaaaacaatagaacatgttaatgagtaatttatattagttcgatgtattacaattttttagctttaaattacagttttcttataatgttgaaatgttttagaatcctttgaatctaagtatttgtttcctaaatgaaacatttgtacaacatttgatgtttttacttatgaaatattctcctcccccaagaaaatttaaactttttctctctatttaaaagctaagaaatgttttaaaggaaaaatgaaattatcttcctttagcttatttttaaggtaaaacagctttttactctgttattgtggtaatggacagaatattacatacaaaaatattctgggagagctttttcctagttggttttaaatcattgtgccacctgaaaggtttttagattttataggagctaatttgtccaccagcattaatgtaacacagtgtagttatgaaaatatattgaaggacaggaagtggacacgaagtgatttttgtaacctgagcagttaatgaatgtgccaacattttctaggaagggacagcaagaatattctgctctgtagttaaaatactggctggcttttgatgtcttcatgcttaattgtgatcactttcttgcactgtgatgtttttacgtgaatatgttgaagtagaagtctaccatattattttataaaatgttttctgtatggcaataaactgaaaacatggatcaacccttcttttgaaaataaactgagtcaatttagccttttaaaaatatagtcatctcttttaaatagaatcctcttccaccatcaaggctcaacattttgtaagcatccaaaaaattggtaattagggggcttgcactaaatttcactatcttcagtagagaggaactgtttggaacttagatttccaatgtgtatattctaatggagaaagcaagaggtagagtttgtatgtttgacttaccttagatttttattttccatacatactgcaaatgattgacttgttgcataaatgaagatcttctgttgtgtgcttttcaaacactgtaaataaatttgaaatttgaa

SEQ ID NO: 620 - protein, 436 aa, Human
MRLARLLRGAALAGPGPGLRAAGFSRSFSSDSGSSPASERGVPGQVDFYARFSPSPLSMKQFLDFGSVNACEKTSFMFLRQELPVRLANIMKEISLLPDNLLRTPSVQLVQSWYIQSLQELLDFKDKSAEDAKAIYDFTDTVIRIRNRHNDVIPTMAQGVIEYKESFGVDPVTSQNVQYFLDRFYMSRISIRMLLNQHSLLFGGKGKGSPSHRKHIGSINPNCNVLEVIKDGYENARRLCDLYYINSPELELEELNAKSPGQPIQVVYVPSHLYHMVFELFKNAMRATMEHHANRGVYPPIQVHVTLGNEDLTVKMSDRGGGVPLRKIDRLFNYMYSTAPRPRVETSRAVPLAGFGYGLPISRLYAQYFQGDLKLYSLEGYGTDAVIYIKALSTDSIERLPVYNKAAWKHYNTNHEADDWCVPSREPKDMTTFRSA

SEQ ID NO: 621 - DNA, 3654 bp, Human
ctgagctgcctctgagctcccgaaggatgaggctgacacattgtggcctccaagaaaagcacctagagcagctctgcaaggctctgggaggaagctgccacctcggtcacctccacctcgacttctcaggcaatgctctgggggatgaaggtgcagcccggctggctcagctgctcccagggctgggagctctgcagtccttgaacctcagtgagaacggtttgtccctggatgccgtgttgggtttggttcggtgcttctccactctgcagtggctcttccgcttggacatcagctttgaaagccaacacatcctcctgagaggggacaagacaagcagggatatgtgggccactggatctttgccagacttcccagctgcagccaagttcttagggttccgtcagcgctgcatccccaggagcctctgcctcagtgagtgtcctctggagcccccaagcctcacccgcctctgtgccactctgaaggactgcccgggacccctggaactgcaattgtcctgtgagtttctgagtgaccagagcctggagactctactggactgcttacctcaactccctcagctgagcctgctgcagctgagccagacgggactgtccccgaaaagccccttcctgctggccaacaccttaagcctgtgtccacgggttaaaaaggtggatctcaggtccctgcaccatgcaactttgcacttcagatccaacgaggaggaggaaggcgtgtgctgtggtctctcagcaaacctgctgggcgacagcggactcagatgccttctggaatgtctgccgcaggtgcccatctccggtttgcttgatctgagtcacaacagcatttctcaggaaagtgccctgtacctgctggagacactgccctcctgcccacgtgtccgggaggcctcagtgaacctgggctctgagcagagcttccggattcacttctccagagaggaccaggctgggaagacactcaggctaagtgagtgcagcttccggccagagcacgtgtccaggctggccaccggcttgagcaagtccctgcagctgacggagctcacgctgacccagtgctgcctgggccagaagcagctggccatcctcctgagcttggtggggcgacccgcagggctgttcagcctcagctgaagcggtttcaaggtgcaggagccgtgggcggacagagccagggttctctccctgttagaagtctgcgcccaggcctcaggcagtgtcactgaaatcagcatctccgagacccagcagcagctctgtgtccagctggaatttcctcgccaggaagagaatccagaagctgtggcactcaggttggctcactgtgaccttggagcccaccacagccttcttgtcgggcagctgatggagacatgtgccaggctgcagcagctcagcttgtctcaggttaacctctgtgaggacgatgatgccagttccctgctgctgcagagcctcctgctgtccctctctgagctgaagacatttcggctgacctccagctgtgtgagcaccgagggcctcgcccacctggcatctggtctgggccactgccaccacttggaggagctggacttgtctaacaatcaatttgatgaggagggcaccaaggcgctgatgagggcccttgaggggaaatggatgctaaagaggctggacctcagtcaccttctgctgaacagctccaccttggccttgcttactcacagactaagccagatgacctgcctgcagagcctcagactgaacaggaacagtatcggtgatgtcggttgctgccacctttctgaggctctcagggctgccaccagcctagaggagctggacttgagccacaaccagattggagacgctggtgtccagcacttagctaccatcctgcctgggctgccagagctcaggaagatagacctctcagggaatagcatcagctcagccgggggagtgcagttggcagagtctctcgttctttgcaggcgcctggaggagttgatgcttggctgcaatgccctgggggatcccacagccctggggctggctcaggagctgccccagcacctgagggtcctacacctaccattcagccatctgggcccaggtggggccctgagcctggcccaggccctggatggatccccccatttggaagagatcagcttggcggaaaacaacctggctggaggggtcctgcgtttctgtatggagctcccgctgctcagacagatagacctggtttcctgtaagattgacaaccagactgccaagctcctcacctccagcttcacgagctgccctgccctggaagtaatcttgctgtcctggaatctcctcggggatgaggcagctgccgagctggcccaggtgctgccgcagatgggccggctgaagagagtggacctggagaagaatcagatcacagctttgggggcctggctcctggctgaaggactggcccaggggtctagcatccaagtcatccgcctctggaataaccccattccctgcgacatggcccagcacctgaagagccaggagcccaggctggactttgccttctttgacaaccagccccaggccccttggggtacttgatggccccctcaagacctctggaatccagccaagtgatgcacccaaatgatccacctttcgcccactgggataaatgactcaggaaagaagagcctcggcagggcgctctgcactccacccaggaggaaggatacgtgtgtcctgctgcagtcctcagggagaacttttttgggaaccaggagctgggtctggacaaaggagtaccctgcattacgtgggatatgtgtgatcaattggggacatgcgacacacaatgagggtgtcatgacaatgcatgacacgtacggttatatgtggcagtgtgaccccttgacatgtggcgttacatgaaagtcagtgtggcacgtgttctgtggcatgggtgctggcatcccaagtggcaggatacatgattgttggtctatatatgacacatgacaaatgtccatgtcacaggactcatggctggccagatgacctcaggctggcccaagatctaatttattaatttttaaagcaaatacatatttatagattgtgtgtatggagcagctaagtcaggaaaagtcttccgcccgagctgggaggggagagtgtccatgcactgaccagtccaggggctcaagggccagggctctggaacaagccagggactcagccattaagtcccctcctgcctcaatcctcagcctacccatctataaacttgatgactcctcccttacttacatactagcttccaaggacaggtggaggtagggccagcctggcgggagtggagaagcccagtctgtcctatgtaagggacaaagccaggtctaatggtactgggtagggggcactgccaagacaataagctaggctactgggtccagctactactttggtgggattcaggtgagtctccatgcacttcacatgttacccagtgttcttgttacttccaaggagaaccaagaatggctctgtcacactcgaagccaggtttgatcaataaacacaatggtattccacgtcaaaaaaaaaaaaaaaaaaaaaaaaaaaaaaaaaaaaa

SEQ ID NO: 622 - DNA, 3920 bp, Human
cggacgcggcggacgtgggtgagggcgcggccgtaagagagcgggacgcggggtgcccggcgcgtggtgggggtccccggcgcctgcccccacggcacccaagaaggcctggccagggtaccctccgcggagcccgggggtggggggcgcggggccggcgccgcgatgggcccgggacccccagcggccggagcggcgccgtccccgcggccgctgtccctggtggcgcggctgagctacgccgtgggccacttcctcaacgacctgtgcgcgtccatgtggttcacctacctgctgctctacctgcactcggtgcgcgcctacagctcccgcggcgcggggctgctgctgctgctgggccaggtggccgacgggctgtgcacaccgctcgtgggctacgaggccgaccgcgccgccagctgctgcgcccgctacggcccgcgcaaggcctggcacctggtcggcaccgtctgcgtcctgctgtccttccccttcatcttcagcccctgcctgggctgtggggcggccacgcccgagtgggctgccctcctctactacggcccgttcatcgtgatcttccagtttggctgggcctccacacagatctcccacctcagcctcatcccggagctcgtcaccaacgaccatgagaaggtggagctcacggcactcaggtatgcgttcaccgtggtggccaacatcaccgtctacggcgccgcctggctcctgctgcacctgcagggctcgtcgcgggtggagcccacccaagacatcagcatcagcgaccagctggggggccaggacgtgcccgtgttccggaacctgtccctgctggtggtgggtgtcggcgccgtgttctcactgctattccacctgggcacccgggagaggcgccggccgcatgcggaggagccaggcgagcacacccccctgttggcccctgccacggcccagcccctgctgctctggaagcactggctccgggagccggctttctaccaggtgggcatactgtacatgaccaccaggctcatcgtgaacctgtcccagacctacatggccatgtacctcacctactcgctccacctgcccaagaagttcatcgcgaccattcccctggtgatgtacctcagcggcttcttgtcctccttcctcatgaagcccatcaacaagtgcattgggaggaacatgacctacttctcaggcctcctggtgatcctggcctttgccgcctgggtggcgctggcggagggactgggtgtggccgtgtacgcagcggctgtgctgctgggtgctggctgtgccaccatcctcgtcacctcgctggccatgacggccgacctcatcggtccccacacgaacagcggagcgttcgtgtacggctccatgagcttcttggataaggtggccaatgggctggcagtcatggccatccagagcctgcacccttgcccctcagagctctgctgcagggcctgcgtgagcttttaccactgggcgatggtggctgtgacgggcggcgtgggcgtggccgctgccctgtgtctctgtagcctcctgctgtggccgacccgcctgcgacgctgggaccgtgatgcccggccctgactcctgacagcctcctgcacctgtgcaagggaactgtggggacgcacgaggatgccccccagggccttggggaaaagcccccactgcccctcactcttctctggacccccaccctccatcctcacccagctcccgggggtggggtcgggtgagggcagcagggatgcccgccagggacttgcaaggaccccctgggttttgagggtgtcccattctcaactctaatccatcccagccctctggaggatttggggtgcccctctcggcagggaacaggaagtaggaatcccagaagggtctgggggaaccctaaccctgagctcagtccagttcacccctcacctccagcctgggggtctccagacactgccagggccccctcaggacggctggagcctggaggagacagccacggggtggtgggctgggcctggaccccaccgtggtgggcagcagggctgcccggcaggcttggtggactctgctggcagcaaataaagagatgacggcagcctggctcctgtctgcctgcgggggggctctgggcaggggtagcctgggcatctcagccctgccctggttgtgggcggccagcgagcccagtgtctgcctctgtcccgagcctctggtcccctgggactaggttagtgccccctcatctgggtgcagagacagtgggtgcatcctggtagcatgcctttatcggggagtgggtgtgagggaaggcggggaccgctggcaggtggaggggcagtatggttccaggacccactcccggtagttctgggtggtgccgggcgggcgctggggtgccgacagggagggcacgtagtctgatgccctccacagtggctccaccccgtaccggttcctgttgagcactgtaggtgggactcgggtcaccatgtgcccccacctcctcgccgttggccagcaaggggctcctggatcgccccgggcagtttcaccctggcctaggtggccttgtccccctggcctcccaaggacccaccctgcacctagcctcaccgtattccttgccccggattggcctgtctttccacagcgcgctcccccaccgggtgctgggggcctggtactgggcagggacgatggggtcatgccaggcggtctcccgcaggtgctgggtgtaggctgcggtggggcgggggctggcggtcattcctgtccccctctggcaggcccgctgcccagggcgggggggggggcactcacccgatggcatgctgcactcacggtgttggtagcagctgtgccagcggttgtaggcctcgcggaaggggctggccggggcccgtggcaggttgtaccaggcttcccaggcgtccgagttggtcaggcctgtgtaccacagctggccggctgcgtcccgtcccatgggcgtgtacttccagcgtgtggcctgcctgatggctggtggccagcgggaaccctccagggacaggtagtcatcgctgagggtgggcagggggcagagactgagcccatgtctacagcgagtgctttgacccctttgcgatgtctgccagggtggatgatgtagaggcctggcccacggcgtggggtctccctccctcgccacttggagtctgtccttcagccctgtacccctcaccccagagtgggtgcttgaggagagaggctgactccccctctccccacacatcgcaccccaagcacccaagtcagcactaaacctttctgttctcagcttttcttgcctggagaagagggaggggagaggacaagggccctggctactcctggattcctacagtccttgtccagcctccaagacccacaagtcccttcctctgggaagcccccctggcctggaggtgcaccaggaagaagtggtctggggctggcactaagccatggcccagggaagactgggggacccactaggccaggtgtgtggctcacgcttgtaaacccagcactttgggaggctgaggcaggtggatcacttgaggtcaggagttcgagaccagcctggccagcatggtaaaaccccatctctactaaaaatacgaaaattaagccaggcatggtgtgggggcggggggcacctgtaatcccagctactcaggaggctgaggcaggagaatcgcttgaacccaggaagtggagtttgcagtaagctgagatcgtgccctttgactccagccctgggaaaagagtgagactccgtcctcaaaaaccaaagggccaggagactcaaagaatgtcttatgctttgaaccttgctccttggaataatgtcccagggaagtcatcccagaaaacaa

SEQ ID NO: 623 - DNA, 1382 bp, Human
aagaaaggcacttccggtgtctgttgccaggcgcgggcccagtgggccgtaggggcgacattgttgccgtcgtctttccccccccagtcccggggatggagatgtcgggactcagcttttcagagatggagggctgccgtaacctacttggcctactggacaacgacgagatcatggccctatgcgacaccgtcaccaaccgcctggtgcagcctcaggaccgccaagatgctgttcatgcaatattagcatacagtcaaagtgcagaagaacttctgaggcgtagaaaagtccaccgagaagttatatttaagtacttggcaacacaggggattgttatacctccagctactgaaaaacacaatcttattcagcatgcaaaagattactggcaaaagcaaccacaactgaaattgaaggaaacgccagagccagttacaaagacagaggacatccacctatttcaacagcaggtgaaagaagataaaaaagctgaaaaagttgattttcgtcgcctaggagaagaattctgtcattggttctttggacttcttaattctcagaatccttttctaggaccacctcaagatgaatggggaccacagcacttctggcatgatgtgaagcttaggttttattacaacacatcagaacaaaatgttatggactaccatggagcagaaatcgtgagccttcgtttgctgtcactagtaaaagaagaatttctttttctcagccccaacctagattcacatggactgaaatgtgcatcttctcctcatgggctggttatggttggagttgctgggactgtccatcgaggaaacacttgtttgggcatttttgaacaaatttttggactcatccgctgcccttttgtggagaatacttggaaaatcaaatttatcaacctgaaaattatgggagagagttcccttgctcctggaacattaccgaaaccatctgttaaatttgaacaaagtgatctagaggccttttataatgtaatcactgtatgtggtaccaatgaagtacgacataatgtaaagcaggcttcggatagtggaactggggaccaagtttgaggtagtggaaatgagacattgctgaacaaaagagaactgggtttacctgaccctctaaagcgctaagtactgtcagcctgaaaaaaatcttctatacagaaactcttccaaatactatatcagtaatgtctgaatgatttcagatgtgaaaattgacatattttagttgaaatacctttctggactacagacttacatatcatgtgaatacttacctatttctacccgagttgcagcaagtattctgaaagcttaatgcaaataaatcccactttagatcctaaaaaaaaaaaaaaa

SEQ ID NO: 624 - DNA, 2237 bp, Human
  unsure 482: unknown base
  unsure 483: unknown base
  unsure 484: unknown base
  unsure 485: unknown base
  unsure 486: unknown base
  unsure 487: unknown base
  unsure 488: unknown base
  unsure 489: unknown base
  unsure 490: unknown base
  unsure 491: unknown base
  unsure 492: unknown base
  unsure 493: unknown base
  unsure 494: unknown base
  unsure 495: unknown base
  unsure 496: unknown base
  unsure 497: unknown base
  unsure 498: unknown base
  unsure 499: unknown base
  unsure 500: unknown base
  unsure 501: unknown base
  unsure 502: unknown base
  unsure 503: unknown base
  unsure 504: unknown base
  unsure 505: unknown base
  unsure 506: unknown base
  unsure 507: unknown base
  unsure 508: unknown base
  unsure 509: unknown base
  unsure 510: unknown base
  unsure 511: unknown base
  unsure 512: unknown base
  unsure 513: unknown base
  unsure 514: unknown base
  unsure 515: unknown base
  unsure 516: unknown base
  unsure 517: unknown base
  unsure 518: unknown base
  unsure 519: unknown base
  unsure 520: unknown base
  unsure 521: unknown base
  unsure 522: unknown base
  unsure 523: unknown base
  unsure 524: unknown base
  unsure 525: unknown base
  unsure 526: unknown base
  unsure 527: unknown base
  unsure 528: unknown base
  unsure 529: unknown base
  unsure 530: unknown base
  unsure 531: unknown base
  unsure 2036: unknown base
  unsure 2059: unknown base
  unsure 2078: unknown base
  unsure 2097: unknown base
  unsure 2106: unknown base
ggaaaggcttcatagagcaagatatcatttagagttgaaaaaaaagaatagaattttgaccttgggacaatatgggccgagggggccttgacttaaagctcttattttagttgctagacattatttcgtaaaaacagtttcatttaactggatgtccatattgccagagttactggcagtttcttaaatgtactgaagttcacattttaccacagcttaggaatttattatttgaactgtttccttgtgctattttttcaaactgtttaaacaagtttaatttttttgaatacaccaagaaataaatgatactgtgaaagccttcatactcatcattattttgattattctaatgttacacttaagggtaagagattcagaaataatgaatgactggcttgaggtcaggtagataattgcagaaacagaattggaacctaagtcttctgacctctgatttactattcttttgagatgaccannnnnnnnnnnnnnnnnnnnnnnnnnnnnnnnnnnnnnnnnnnnnnnnnntttagtttaagttcatttttgtccccgctgatgaaagttagagctgcttcctccaggcagccctgggagtaggggcacagacttgtgcctcgcttcccagcagctgcccagtgcctctgtccacacccacctccctggtgtacttgccccctacagcagcagcccagatcctcccctggattaaaattgcaactggtgccctaacccaaaacttgagaaaaaattctctatcacatccactcttctggcatttgtagaatctctggccctgggtgtgtcttttcctgtagctgttacagatttcttaagcagatttcttaagcagatggacatgtccagattcatgcctaaatatccagttgataactggaaaatgctggttcacggttctttagtaaagattaataagggatccccatgtgctggggagtgtgcttccatttgagtggggatatcagaagaaaaagaggggcttgtgtagtaaaccttactttgccaattcagctgtagagcccaaattgttacaagatgcaaagatgtactccactttttgaccaagcatcagcacctttggcttaccatccagtccttacttctgtgactgtaagggccccaccagtgtcagcagacttgtttgtgctttgggggaactctcttctcagctccctttgccagtcccaagcctggtggatctgcatctcacgcccactgcacaccgttcctctccatctgcccttccctcccaggcccccggtcgggggagcaggtgtggcaagtgttaggaactcccttctggtgacagctggtcttcctagagtgttgctggtaactatcgcctcttggtcttctgacatcattgccaggaacggggcactttttcgtcttgtagtttggccctcgggtttcctcactaggtattgtgtaactccctcaaaaaaaggtttatgaaatgctgaacctcaggtttcatagacgtctttgtacactaaaaattctgcagcagaatatttttaaacattcgcagttttttgtaagctatatttttgtatatttaattgctattttaaaattttaatgcattttgctaatcactcctcaaaaataaaacatgcatgtaattgactcaaacgtgtaaataaaagcaaattttgacgcaagcaccttcagcaagacttggaaactcaaggtgagtaattctatcagagctggtaactagtactgagtgattgtgatggaagcccctgcccttcctgtggcatagtgtgcaagcgggggtggggtcagtggtgaagagtgtgtcaggccaccacagccagagaacagagaatcctggaatgcagagtacagtggagtctgaagccccctggccttcctgagctctgaaacagctggatacagataagcagtctttcacgtgaacgccagcaccagggtgacctgaaatagcctcgtgccgaattcggcacgagcacacatcacaggcttaaactgtcttagagactttncaagtgattggatcacaggctanggatctgtgcatggtgccngttgaaacccaagtcttcncagtgctangtgagggagggctcaaccggggtaatgtgaatggggctgttgtcttttgcaatcccttaacatattaactttggacaaaccttgataggcttgcaccaaacctttctaaacatttttatggatcatctcct

SEQ ID NO: 625 - protein, 139 aa, Human
MQRCTPLFDQASAPLAYHPVLTSVTVRAPPVSADLFVLWGNSLLSSLCQSQAWWICISRPLHTVPLHLPFPPRPPVGGAGVASVRNSLLVTAGLPRVLLVTIASWSSDIIARNGALFRLVVWPSGFLTRYCVTPSKKGL

SEQ ID NO: 626 - DNA, 1415 bp, Human
ggggaagggagaggagcatgtctgcaactcgagccaagaaagtgaagatggccaccaaatcatgccccgagtgcgaccaacaggttcctgttgcatgtaaatcatgtccttgtggttacatatttattagcagaaaacttttaaatgcaaaacactcagagaaatcaccaccttctacagaaaacaagcatgaggccaagaggaggcgaacagagagagttaggagagagaagataaattctacagtaaataaagatttagaaaacagaaagaggtctcgaagtaacagccattcagatcatatcagacgaggaagaggaagacctaaaagtgcatctgccaaaaaacatgaggaagaaagagagaaacaggaaaaggaaattgacatctatgctaacctgtctgatgaaaaggctttcgtgttttcagtcgccttggcagaaataaatagaaaaattatcaatcaaagacttattctctgatacttgtttgcaaaatctgctgaaacttctgtcaggataacatcagcaaattctcaaacagttatggactctcaggagcattctgactgcatcaataagggccatcgattgtttctttctcgcctgtcgtttagcctgtgccacacttcgggagcaaagctgtgtaggcttggactgttctgggatttccttgtttaccaaggagtattgtcagtgttttgtgtttgggatataagtaagtgtatttgccaacaacaaaaaaaaaccaacaaaaatgctggatggatgttaaaggataaaaagtgatggggtatggggtaggtatgaaaactagggtaataagatgcttgattgttttcaggtttgccaccagagatgcaatattttaaatactgtcagaaagagtgatttttaaaaatatatatttcagattttcagtgctaacagattgcatatatacagttcatttacttttattaaattggcaatcgatattttattgaatggggaattaagaatataaactgtaaattttgtcttaaattgattttttttcttggcctttatttttattacttaaggtatgagttatattttaggagatactttctagacagtttgaagtttgggtgctatatgaagaaaaacatttaatgatatactcagatataaacaccttgttttcttgaatgtaatttatttattagctaaaaaaaaaaaacaaactgctctcaagatggtgcctgttaacctaaacatgaaatatatttattacatgcaaaatatttcttagccacttttaagcagtaatgttttatctgaatggatatttgtttctatatcctgataattatttaaattgttactttcaatctggaagaaaaaataaaccttaatattgaaaccaaaaaaaaaaaaaaaaaaaaaaaaaaa

SEQ ID NO: 627 - DNA, 7346 bp, Human
cggacgcgtgggggaggagcagggggagggctgtcaaattcgggagccagattttttcccttctcctggcaatcccttccgcttccccggctcccgacgtgacatctgcgggccggggacctgcatgtgtgtgcgcgcgaaggagcggaagaatggcagtgctcaaactcaccgaccagccaccattggttcaggcaatcttcagcggtgatccagaggagatccggatgctcatccataaaactgaagatgtgaatactctggattctgagaaacgaacccctcttcatgtggccgcatttctgggagatgcagagatcattgaactcctgattttgtcaggagctcgtgtaaatgccaaggacaacatgtggctgactccactgcaccgggctgttgcttccagaagtgaagaagcagtacaggttttgattaagcactcagctgatgtcaatgcaagggacaagaactggcagacccctcttcatgtggcagcagccaacaaggctgtcaaatgtgcagaagtgatcattcccctgctgagcagtgtcaatgtctccgaccgaggggggcgcacagccttgcaccatgcggctctgaacggccacgtggagatggtcaatttactcttggccaaaggggcaaatatcaatgcatttgacaagaaggaccggcgtgctctgcactgggcagcatacatgggccacttggatgttgtagcattgctcattaaccatggcgcagaagtgacctgtaaggataagaagggttatacccctctgcatgctgcagcctccaatggacagattaatgttgtcaagcatctcctgaacctgggggtggagattgatgaaatcaatgtctatggaaatacagcgcttcacatcgcctgctacaatggacaggatgctgtggttaacgagttgattgactacggtgctaacgtgaaccagccaaacaataatgggttcacccctttgcattttgctgctgcctccactcatggtgctttgtgtcttgaattgttagtaaacaacggggcagatgttaacattcagagtaaagatggcaaaagtccactgcacatgacagctgtccatggaaggttcacacggtcacagaccctcattcagaatggaggtgaaattgactgtgtggataaggacggcaacactcctctccatgtggctgcaagatacggtcatgagctttgattaacaccttaataaccagcggagctgacacagccaagtgtggaatccatagcatgttccctttacatttagctgccctaaatgctcactctgactgctgcagaaagttgttatcatcgggctttgaaatagacaccccagataaatttggaagaacgtgccttcatgctgctgctgcaggaggtaatgtggaatgtataaaactcttgcagagcagcggagcagatttccataaaaaggacaagtgtgggaggacccctttgcactatgcagctgcgaattgtcatttccactgtattgagacattagtgaccacaggggccaacgttaatgaaacagatgactggggacgcacagctttgcattacgccgctgcatcagacatggatagaaataagactatcttaggaaatgcccatgataattcagaagaacttgaaagagccagggaactgaaggaaaaggaagccacactatgtctagagtttctgcttcaaaatgatgcaaatccatctatccgggacaaggaaggttacaatagcatacattatgctgccgcctatgggcacaggcagtgtctggaattgcttttggaaagaacaaacagtggatttgaagaatcagattctggtgctactaagagtccactccacttagctgcctacaatgggcaccatcaagccttggaagtccttctgcagtcgttggtggacctggacatcagggatgagaaaggccgcactgctctggatctggctgcctttaaaggacacacagaatgtgtggaagcgcttatcaatcagggcgcatccatctttgtgaaagacaatgtaaccaaaagaaccccacttcatgcctcagtaattaatggtcacacactgtgtttacggctgttgctagaaattgcagacaacccggaggcggtcgatgtgaaagatgccaaaggacaaacaccactgatgcttgcagtagcatatggacatattgacgctgtttcattgttacttgaaaaggaagccaacgtagacactgttgacatcctaggatgcacagctttacacagagggattatgacaggacacgaggaatgtgtgcaaatgctgctggaacaagaagtgtcaattctctgtaaagattccagagggaggacgcccttgcactatgcagctgctcgtggccacgccacgtggctgagcgagctgctccaaatggctctttctgaggaggactgttgtttcaaagataaccaaggctacacgccgctgcactgggcttgttacaatggtaatgaaaactgtatagaggtacttttggagcaaaaatgttttcgcaaatttatcggtaatccctttactccactgcactgtgcaataatcaatgatcatgggaattgtgcatcattgctgcttggggccatagattccagtatcgtcagttgtagagatgacaaaggcaggacaccccttcatgcggcagcatttgctgatcatgtggagtgcttgcagcttcttctgagacacagtgctccagtgaacgcagtagataattcagggaaaacagcactgatgatggctgctgagaatgggcaggcaggcgctgtggatattttggtgaacagtgcccaggctgatctgactgtaaaggataaggacttgaatacacccttacatttggcttgtagtaaaggtcatgaaaaatgtgccttgttaatacttgacaagatacaagacgagagccttattaatgaaaaaaataatgcactgcagacacccctccacgtcgctgcgcgcaatggcttaaaggtgttagttgaggagttgctggccaaaggggcctgtgtacttgctgtagatgaaaatggtcataccccggccctggcttgcgctcctaacaaagacgtggctgactgcctggccctcattttggctaccatgatgcctttttctccttccagtacaatgatggctgtcaacttcgtttgtttaaaaaaagacaatttgagcaggacgaccctctccaatctgggtagcatggttagcctgtgcagtaacaacgtaggctcggaggatgggtacaatgaaaatgattctgattcggaaacgttttgactttggactgtagaagcttttctttgatcacctgtgttggaggaaaggaaagaagcttgaattccaggtttatgttgtattcaagtattatttggggcctgggcttccagaagctagtagagaaggaattaatcgagggagggcagtgaggctgttgggtggaacagtcacacagatggccccagttttgttttgtttcacattttctttaaatctaagatacttctgtgaaagtctacctctcattttaagtaaagaataaaagatgtatttaattcctgttctttggggataatgcagcagagaggcagctgttcgctatgaataatttttcttttcatgtatttagcagtgagttctcagaagtatatcagtgtgacattcatgtcccctgggagggaagggaagaggcagataggaaatgcctcaaacttcttctcactttgatgtttacttcctcactagaagccaaaggtaaaggtgtccatcttcagaaataatgcctgtaataatctttttagagagtccaactatttatatcctctctatagtaagcatttgaatatccagaacttctttctgaggatctctgttaaagttgccagatgaattgaaaaattgaacttgctttttttgtttaacacagtgttccctataacaagcctgtgactaattttcacttaagtgattgaacccaaatttatctaataacatttcaggtgaaaattatattgcaccaaaactttgacacaatatgcaaaaatagtatgaaactaccctttgttaatttattcttaaatcaaaatactaacttttaaaaaacatcagaatcatcagcattgttcatcagtagtaaaatgagcttctcagtcaaggtcataccaagtcagtgaaaagtgtgactgcaaaaaggaacaaaaaaagtgaaagcagaaagtagaaatgggtgatttagcatgtaaaaccgattgccagttgcttgatgatgaaatcaacatagtgaatactgtgtctgctccctctgccaaagcttctaggtcaaatggaccccgttccacacctggaaccgctgtacaaaaagaagaatgagactctttaaaaattatgcacatacacatgcacacatatatgtgtgcgtgtgtatatatatatatatgtgtgtgtgtgtgtgtagttcatcagccagctacacatgaggaccaaaatgcttcagtctaaaatggaagatacacatttttttccttcaaaatgcaagtgagaactgaagtagcttttttatggagttaaatgtaatctttctgtgtaccagtctttgttgtattttatatttcttaggacacagatttctagttgaccacttaacatttgtaactgatgatgtgttgaccttttttttttttttgccaaactagagaaaatgtccatatacttttgctgtaaatgtgtttatatttatttgaaatgaaacaaatggtgaggaaacatccattatttgttctctattttaattgctatgtatcttatttagaataacaaaaaaaaagtgaaaaaaaaaacacttgaccctgggctagccaaaagcccaagggccaaacctagcatttccactgctaaggtttccagatgaccctcaggttcttccgcgttggttagagagggctacgcatcttctactgctcagccacagtctgtagccagcttagagcttagaagacattgcagtctggatgcccttctgcgagatgaaaactcagatgtgtagtggatcatatacacaaaggcagcacaaagaaatatctagaaattaccctaagtacactgaaaagctcacatagtctcagtaacctgatgagaaatgatggcagtgtgtgggcacatgtgccaaaaggagaaataaaaatcaccagctcaagtgctattttctacttgaggaagagacagaaaagaaatgtgtcgaattagagcagtactctctgacgttttataatgagttccatttccaccctggaaattgctattttatagtgtatgtgagatatttcaaaaataatgttctatcatatctggatcaaagacagataactgtattatatttttcatctagctataaaactttaatcttactcttaatatcctggatttaattaaaactcctgttgggttcttcacaaatgagaacttgttcaaaggatttattgaactggtattgatttcactgaaaattttccacaccaccaccattgtttttttgaattcttggtgttgtgcttcccaccttctgtccttttcgtttgtttagagaagatgaatttttaaaaagcagataaattgctaatgagcaataatgaccttatctttaccaaaacactgaaaattaagagaggttcagtgttgaagaagcacaatatgctgcggtgtctttttctagaagtgaatggaaatcttgctcagttggcatttcaagcaggaaatgaaatgcttgctttaatggcaaagcagcgttaacatttttcctgtcgtgtagcagagagtacaagaatcatttcagcaaagcagtgactcaccatgagacgttatctccatggagctgcgttttgacttttcccactctcttactcatagaaggaggacaaaggaacgaaatgaaatcatgctcacaatgaactgttcattacatcaactgattctctctcttttttttctttcctctctttctctttctcccataccccaaggcaaaatttttttaaagaaatgactttaaaaactatcatttctgtattttaattacatctcttagaaataaaattatgtttgcaccatagctttctaagaaaaaaaaatgtgtttttaactgagtcttagttgcttagtgcttttatttgtgttatttttagactgtattttaaccacaactacaaggatcatgtttcattgcacttacttatttgccagtgtctgcctgtctttgctaaatacattactatctccaaattgcctaaaatctgctatgattctacagtaaatagctcagggtatttctatttatcactactaaaagggcaccatagtatgttttggtactttaggcagtaaacactgcttggtttatcattttgttattaaattagaacaagaacatcaaatggatttgctgcactagttattctttgtactgttgagcaacttggtgtgcttatatgttgtgttggttgaagaactcatccgttttattgtcttgtaatatgaagttagagtgcctttttatatttgtatattctgaaaatgttctgtggaatgttttgtattttttcatttgagtgttatcagagcaatatgataccagtgagttttcatttcaacttttctttgaatgtataaagtgtcttttttcctatttccccttgtacttgcattgaaatgaatatgaaaatgcttaagttttctataggaattgtttgattttgcagtgctaaaatgctttcgtcttacgaaactataaaccataggtcagtattataggggaaaagcattttaagatagtgacaatctgagtgtttgtataaaatgtaattctatgcgtttcttatgtgatctaaaaattcaatgcaaatatcttttatttggtagttttgtctacatattttatgctctagcatgtgcaatatatctttgtaaagcacgatgatacaaatctggtgccagtgttatattttgcataacatatttgtaacagcataaaatattgtttgatgatttcagtgggattttgtctataatgttttcttatgtaaattggagttgaatgactctggtaaatgtcatgactgtaaaaatggggaaaatgacttttagttcagtgaatgactttgaaacaatctgaatcttctcaagcacagtttaatacttttgcaactactgaatgctctaataacgtaatgaagtacttaactgtaatatactatggaaatgcattcagatggttatttttacaaataaaaacggtacaaatattgttggaaaa

SEQ ID NO: 628 - protein, 403 aa, Human
DAWGRSRGRAVKFGSQIFSLLLAIPSASPAPDVTSAGRGPACVCARRSGRMAVLKLTDQPPLVQAIFSGDPEEIRMLIHKTEDVNTLDSEKRTPLHVAAFLGDAEIIELLILSGARVNAKDNMWLTPLHRAVASRSEEAVQVLIKHSADVNARDKNWQTPLHVAAANKAVKCAEVIIPLLSSVNVSDRGGRTALHHAALNGHVEMVNLLLAKGANINAFDKKDRRALHWAAYMGHLDVVALLINHGAEVTCKDKKGYTPLHAAASNGQINVVKHLLNLGVEIDEINVYGNTALHIACYNGQDAVVNELIDYGANVNQPNNNGFTPLHFAAASTHGALCLELLVNNGADVNIQSKDGKSPLHMTAVHGRFTRSQTLIQNGGEIDCVDKDGNTPLHVAARYGHEL

SEQ ID NO: 629 - DNA, 4512 bp, Human
atctgcttctgttttctccatcttagtttgcccaaagcttgctggccgctgtgtagggctggtgagtggctggggctgtctgagccatgaacaacttcagggccaccatcctcttctgggcagcggcagcatgggctaaatcaggcaagccttcgggagagatggacgaagttggagttcaaaaatgcaagaatgccttgaaactacctgtcctggaagtcctacctggagggggctgggacaatctgcggaatgtggacatgggacgagttatggaattgacttactccaactgcaggacaacagaggatggacagtatatcatccctgatgaaatcttcaccattccccagaaacagagcaacctggagatgaactcagaaatcctggaatcctgggcaaattaccagagtagcacctcctactccatcaacacagaactctctcttttttccaaagtcaatggcaagttttccactgagttccagaggatgaagaccctccaagtgaaggaccaagctataactacccgagttcaggtaagaaacctcgtctacacagtcaaaatcaacccaactttagagctaagctcaggttttaggaaggaactccttgacatctctgaccgtctagagaacaaccagacgaggatggccacctacctggcagaactcctggtgctcaactatggcacccacgtcaccaccagtgtcgacgctggggctgctcttattcaggaggaccacctcagggcctccttcctccaagacagccagagcagtcgtagtgccgtgaccgcctctgctggacttgcctttcaaaacaccgtgaacttcaaatttgaggaaaactatacctcgcagaatgtcctcaccaagagctacctctcaaaccgaaccaactccagggtgcagagcattggaggggttcctttttacccaggcatcaccctccaggcctggcagcagggtatcaccaaccacctggtggccatcgaccgctctggcctgccgctgcatttcttcatcaaccccaacatgctacctgacttgccaggccccctggtgaagaaggtgtcaaagacagtggaaactgctgtgaagcgctattatacattcaacacctaccctggctgcacagatctcaattctcccaacttcaattttcaggccaacacggatgatggctcctgcgaggggaaaatgaccaacttctctttcggtggggtttatcaggaatgcactcagctctcagggaatagggatgtcctcctctgccaaaagttggagcagaagaatccactcactggtgatttctcctgcccctctggctactccccggtgcacctgttatcccagatccacgaggagggttacaaccacctggagtgtcatcgaaagtgcactctcctcgtcttctgcaagaccgtgtgtgaagatgtgttccaggtggcaaaagctgaatttagggctttttggtgtgtggccagcagccaagtacctgaaaactcaggactgctttttgggggcctcttcagcagcaagagcataaaccccatgacaaatgcacagtcatgcccagccggctactttccactgagactctttgaaaacctcaaggtatgtgtttctcaggactatgagttgggaagcaggtttgcggtcccctttggcgggttctttagctgcacagttgggaaccccctggtagatcctgctatatccagagatttaggggcaccgtctctgaaaaagtgccccgggggcttcagccagcacccagccctcatcagcgatggatgccaagtgtcctattgcgtcaaatccgggctcttcacaggagggtccctgccccctgccaggctcccacctttcacccggccacccctcatgagtcaggctgccaccaatactgtcatagtgaccaattctgagaatgcgagatcctggattaaagactcccagacccaccagtggaggctgggagaaccgatagagctgcggagggccatgaatgtcatccatggggatggtggtggtctgtcaggaggggctgcagctggggtcacagtgggggtcaccaccattctggctgttgttatcaccttggccatctacggcacccggaagttcaagaagaaagcatatcaggcaattgaggaaaggcagagtttggttccaggcactgcagcaactggagacaccacttaccaagagcaggggcagagtccagcttaaatctctccccgaaaatggtttctctcatctccagtgtggtcattgctgaccactctgttttcctaagcattgaaatggcaagtgcaaccaaaagtaggtatattcgtgacttcttgtttaggtctctgggccaggaattcatactgttacatggataaggttgggattggggagagggaacagttgggactagaagcaaaagtgattctgggactaaaataggaagcagatgtcctttcccaatgtgtgttgctgtcttcacctgaatgcatttgtgtaaaaatagcggagggacaatgtgaacatttgtatttggaagctatgaatttactctgaagtttgcagttgtttccaatttgtgagctctaagagtttctgcctgtaagaactactctccttttattttgatttttaaaaaactgtctgaatttcacactcttagagcctggaagagccctgaaaagacacaagtcttgcctggctactgctttttaactttgagggctctatgttgacagactgttatctcctctgggtgacctcaaacatctgaaaagaaagatgttgcctgtgccaattccactttttccagctgccccttgatgaacactcccttataccagaccactcttggacttctgactggtgtcatcaagtcctcagaaaatattttaagttattttaagttattaaggaagggatgatttggagacaaggagtaatgaaagatgggtaaaaactggaaaagattctggtgctaagtactaccccttcatcttccatggatggtcattacctttcctgtcctcctgttctatgaacacacacacacacacaccccccccacatttcaataagtcttcattgttgtgggtccttacctttcctgtcctcctgttatatgaacacacacacacacacacacacacacacgcacacacataccacatttcaataagtcttcattgttctgggtccttacctttcctgtcctcctgttatatgaacacacacacacacacacacacacacacacgcacaccacatttcaatgtctgcatggttctgggggtaacaaaggcaagaagttaaagtaagaccacatttgagtattacttactctgtagaatcaaaacagagtagttaacaccaattatgcaaactacttttttttccagcagaaagggagctgacatgatcaaatccatgttttcaaatgaactgaaaaaggcatccagcaccacttataacacatttatttcagttccaggctgacagccctggggcatctagcaggatgcataattgtcatctggtgagagttgggactttgctcaattttaataccaatctctcctgattgtaattacctccactactttcatgatccccctacaatatttttttaaatgatatatttattcactgaatcaaatgtcattaatgagttatcttctgtggaggatgactgttctctttgttaatgttcacaatcaagatcttgggctgagaagaggcccttcacccaaggagtttgaagtatcacagcgtgtgggaaggtgggaaccaggatacccattcatttccaaccgagacacagagaagtgagtcacagaatttgagcccgctctcttgactgcccagccagagacactgatttctgtaacctcttcacttgatcctgcctcttaagcattaaaacattctcctaaacctctgagtgttttgtgggttctgggtgttttgtacattttagccaagctaaccacttgtctgcaagtactgactttcctatgaattctttgaagattattgagtcagaaaggaaaaatatagccccaaattcccaggcttttaatgcattacattaactgcctattgaaatgagaagttcttcacaaacttgtatacccactaacaagattgcacataaacatgcattaaagtatatactaagaaaccctctgtccaacggctcatgcatatgaagtccgaacatgggagtttgccaattgcattcatcaagtcgttttgcggagtcagatccctgatggaagagctcacaggctctgccttccaagtcctgggttcctaactggtgaccttagcctggggtctgtggggagaccaaccctggcttccaagaaaaccacattccatggactatcagaaatagacacagatttgggtgacaaagctggctctgtatttgcattttatttttgtgttcttgtcagtttgggaatgattaatattaaacatttatttgagaaac

SEQ ID NO: 630 - protein, 717 aa, Human
AMNNFRATILFWAAAAWAKSGKPSGEMDEVGVQKCKNALKLPVLEVLPGGGWDNLRNVDMGRVMELTYSNCRTTEDGQYIIPDEIFTIPQKQSNLEMNSEILESWANYQSSTSYSINTELSLFSKVNGKFSTEFQRMKTLQVKDQAITTRVQVRNLVYTVKINPTLELSSGFRKELLDISDRLENNQTRMATYLAELLVLNYGTHVTTSVDAGAALIQEDHLRASFLQDSQSSRSAVTASAGLAFQNTVNFKFEENYTSQNVLTKSYLSNRTNSRVQSIGGVPFYPGITLQAWQQGITNHLVAIDRSGLPLHFFINPNMLPDLPGPLVKKVSKTVETAVKRYYTFNTYPGCTDLNSPNFNFQANTDDGSCEGKMTNFSFGGVYQECTQLSGNRDVLLCQKLEQKNPLTGDFSCPSGYSPVHLLSQIHEEGYNHLECHRKCTLLVFCKTVCEDVFQVAKAEFRAFWCVASSQVPENSGLLFGGLFSSKSINPMTNAQSCPAGYFPLRLFENLKVCVSQDYELGSRFAVPFGGFFSCTVGNPLVDPAISRDLGAPSLKKCPGGFSQHPALISDGCQVSYCVKSGLFTGGSLPPARLPPFTRPPLMSQAATNTVIVTNSENARSWIKDSQTHQWRLGEPIELRRAMNVIHGDGGGLSGGAAAGVTVGVTTILAVVITLAIYGTRKFKKKAYQAIEERQSLVPGTAATGDTTYQEQGQSPA

SEQ ID NO: 631 - DNA, 3816 bp, Human
gcggctcccctctctcgggcgtgaggagctggcccgctgagctgctgttgctcccccgcctgctgttgctcctccatctccagatcggatcacggtgagggaaagatgagcgaggagacggcgacttctgacaacgataatagttatgcacgagtgcgagctgtggtgatgacccgagatgactcaagtggtggatggttaccacttggagggagtggactaagcagcgtcactgtcttcaaagtccctcatcaggaagagaatggctgtgctgacttttttatccgtggagagcgactcagggacaaaatggtggttttggaatgtatgcttaaaaaagacctcatttataataaggtcactccaacatttcaccactggaagattgatgacaaaaagtttggtcttacgtttcaaagtcctgctgatgctagggcttttgatagaggtatccgaagagctatagaggatatttctcaaggatgccccgaatcaaaaaatgaagctgaaggggcagatgacttacaagcaaatgaagaggattcttccagttctctagtgaaggatcacctttttcagcaagagacagttgttaccagtgagccttatagaagctcaaatataagaccttctccctttgaagatctgaatgccagaagagtctacatgcaaagccaagccaatcagataacatttggtcagccaggcttggacattcagagcagaagtatggaatacgtacagcggcaaatatccaaggaatgtggaagcctaaagtcccaaaatagggtccctttgaaatcaatcagacatgtcagctttcaagatgaggatgagattgtcagaataaaccctcgagatatcttaatacgtcgctatgcagactacagacatcctgacatgtggaaaaatgacttggaaagagatgatgctgattccagtattcagttttctaaaccagacagtaaaaaatcagactatctgtactcttgtggggatgagactaagttaagttcacccaaagactctgtggtatttaagacgcagccttcctcattaaaaattaagaagtcaaaacgaagaaaagaggatggtgaacgttctcgctgcgtatactgccaggaaaggtttaatcatgaagaaaatgtcaggggaaaatgtcaggatgctccagaccctattaaaagatgcatatatcaagttagttgcatgctctgtgcagagagcatgttgtatcattgtatgtcagactcagagggagatttttctgatccctgttcgtgtgacactagcgacgacaagttctgcttgcgatggttagccctggtagctttgtctttcattgtaccatgtatgtgctgctacgtccctttgagaatgtgccatcgctgtggtgaggcatgtggttgctgtggtgggaaacataaagctgctggatgaaatggtccagtgccaaaatgagcttaaaatctttgtttccaggaattagctaacttggatttgtggaagcttttggcaagcaatatggaatcttgcctggtatcattgagcccacacatggaggaagcagaactcatcagttcttggcgtttcacgccatgcctaacttttcccttgagtgcatggcatgttttgttacaggttgtagagtatttgcagaaggaaaccatttctggttatttggctataaaaagtcagcataaaatatgatccaactaaaagggattaatttttggcatttttgtatatttatgcattaggtgatgggacttttaaaggtttgaatttattaggacacgaactaaaaataaaagtgcactaggggacagttgatttcaatctaagaaaagttaacacttgggaattacaagaagtaaaacaagtgcaactaaatcatttattagttgttttttgaaagcagttttatgtataaataacaaatgtttatatttaactaaatgtaaggtacgaattattacatattaaacttttcttccccttcctagttctgaagtagatatatagatatatatatctactgtcacattccatatattttgaatatttaactcatctagttaataatgtttttattccatgcgaatgatttgatattttcatccttatttctctttggctacaatttatattgagttatatctgtacattctggtaatctaaaatccttaaaaatactctaatagccttgagtgaccaactttttttttaaagcacagatgtaattgtctaatgttctgatgggaacgtaacacttatttttatataaaaagagactgagtaaacaaacattatagaaaaaaagtgaagttttttagttgttttttgtggtattcaaccagcaagttgttttctttcagagtttcctccttcaaaaagttatattgcatttacaaatgttttacaaggcagaaagtttgactggatagttagtgtaaaagcttcatgttgagatcttcacgtatcattctgctaaaccagaatatgttcagctgtgttactaatttttcagcttaatcctcagtgcttattatttacataacaataactttttatcagttacattttatttttatttaaactggccaaaagcaaaattattttatgttaaaatgtgtgctaaactatcccaggaaagtatttaatccaacattgtaaatgaagtatcttgtacatataaatttatttcttttgcagagcattatattactggatgtttaatttacaaaatagttgggtaaatgttccaacaaactttaaagtaccttgaagtcaaattgtctgtttttgttttgttgttgttgttgttgttttcttaagtgttacattaaaactctaaccaaggaaagggttctttaagaacattcccttagagggataaagttgagaagtgtgccttttttttaatggcttgaagtttcagaggtgataaaaattaaaatcacactactatttgaagctcattttctatgcaggtttttaaacgtcatttatgtatcattctttttatatatcacacttaagcttgtgttagcttttttcttttgccccagatcaaactgaacaatgtatataacactatctgtctgtaaaatactttttttaagaaagcatttatatttatatgacagcttgaactgacaacattgtgtatatagatcatcttgaagtattatttcacattgaaaagaagaaaatatattgataactatagatgttatgaagaagagggtatttctagttttatactaaaaatcaattggatgaactaaatccaaaacatgacactgtaggcagcagttttaagtcttatttttactgtttatatatttgaatgctgctacaacagatgatcttcatccctgaagttttcagctaaacttggtttcctagaacagactgttaactttcaaaatttttattggtgaaatggaaatactgtttttccttgtgaatgaattttcatatttgtaagtgctaagtttataattcaggtttgatcaaggtgtgaataactgaagaaaataacttgctggctatataggaaaatgctgtggaaatgaactgtgtatatacttctgggaggaacaaatttaatcatttcttctgttaagcactaatcagtatagtgcaactcctggttctgtactgtattttatatgcaacatatatgctttaatattttaatgtttgtgcattaatattttcaatttgtttaaccactttgctgctaagattttgccgtcccattcccattttttcctttacaattttaaacaagtttcctcattaaaaact

SEQ ID NO: 632 - protein, 444 aa, Human
MSEETATSDNDNSYARVRAVVMTRDDSSGGWLPLGGSGLSSVTVFKVPHQEENGCADFFIRGERLRDKMVVLECMLKKDLIYNKVTPTFHHWKIDDKKFGLTFQSPADARAFDRGIRRAIEDISQGCPESKNEAEGADDLQANEEDSSSSLVKDHLFQQETVVTSEPYRSSNIRPSPFEDLNARRVYMQSQANQITFGQPGLDIQSRSMEYVQRQISKECGSLKSQNRVPLKSIRHVSFQDEDEIVRINPRDILIRRYADYRHPDMWKNDLERDDADSSIQFSKPDSKKSDYLYSCGDETKLSSPKDSVVFKTQPSSLKIKKSKRRKEDGERSRCVYCQERFNHEENVRGKCQDAPDPIKRCIYQVSCMLCAESMLYHCMSDSEGDFSDPCSCDTSDDKFCLRWLALVALSFIVPCMCCYVPLRMCHRCGEACGCCGGKHKAAG

SEQ ID NO: 633 - DNA, 2036 bp, Human
acattcttataacacagcacagtgactttcttctttcaagattgtagctcagagaaaagatacaggattcaattgggggttcaataggatagaaatggagagattcctttgtgttgtagtagaggcattttcctaaggagtatagatttatactttgcattttcattcatcatcccccagaatcatggtcaaggtgtaggtcactccacacagctgatgctcaggttattcccttgtgagaattatgagaataaagctcccaagatatgtgaaagtgcttaacacagtacctggcacacagcactcaataaaagtttggctctattatgggatggttcaattctggtttaaggagggaagaaaggttattatatatgtaccactaagcaaatatatatatatatatatatatttgggtttttttttccctaatattatttgggtgtcccctgtgcttctttaggatgtagttataactaaacctgttatacttgaacatcactaagagaagtaaattattatgaagctagcaaaaatcttgaggccaaagttgtttcttaacagctttaataatgcttgttgattttgaataatcctttaaaaagtggaccatttgcttattttaatatcacgtcagtaaaatgttagtattaaaaagatcagctttttatggcattgaagaatgtatctgctaagacacaaaaattgcatggtaagtataataggtggaggaggaaaggttgtaggccggatgaaaatttaactgactagaacatttattcaggagtgtaattattttcccttaccccaatccctgtgtacgtgttgggtatagttacgacattatccggatttgcaaatagacacaactttcagtcttaccctgtttattgtttaagagtgatagactgttgtcctcttgctggtggaaaatctaaggtggagcccactcttctatgctgaagttcaccaggcagagcagttttcttacaagtcagctactctgcttggtttattttaggttttggtacttcacgtaagcactgttagaaggtacaagtgtattaatatcactagttttgaggcgcttgggtacatttgtttttaatatatttagaatgtgcagtaaacttttttctcatttttttttctttttagcaaacttgttattttaggtccaattattgagttgacagtctactgtgagaatgagatgacatatctactgtgagaataccataaatgatgaatagtttatttgagaacttttatactcagtggtgttttatatattaagataaaaatatgtacacacatgcatgtcacatctctctactgtggagttaatgtgaatttttaaaaaatggaattgcaaccacaaccatatctaagagaacattcactcctagtgagggtttacaaaagctactaagagaataaggtagatgataatgcaaagggtcatgatttggggttatttttgttttattttaaaatttatactgctacttttgaaagaattgtttttatgactatgctctttttgtgattgaaaagtcatctaatagaagctgtatagaagctactttttaattgctggcaaacagctttaagtgcactttctttgattacacttccattttttgttaaacttgaattttctgaagccttttatgtaccactaagcaaataactttaacctttaaataaagcaaatttacatctttattgtatttctacttgttacaaaacatacttgctaaagtaacttcagtcctcaaatatagctgggaaacaattatgagataggctcagtctccccctcccaccccttttcccctgccatatctaattaagcactaactgattttattactttattgcctttacactgcttattctttttgactgaattctgtccctgattcactgttttgtttgaaatttaaagttattttcttactgtatttatcatacctgttttaatctgttttctttaaatgcaataaatcccaaatggattgcatattctttat

SEQ ID NO: 634 - DNA, 372 bp, Human
  unsure 53: unknown base
  unsure 62: unknown base
  unsure 63: unknown base
  unsure 64: unknown base
  unsure 66: unknown base
  unsure 68: unknown base
tcatggtcagtgtcagcttgatttatgtcgacatgaagttcggtatggctgtntaagggaannngngngcttttatgcccatagtcttgtggaactgaaagtctggataatgcaaaatgaaacaggtatctcacatgatgctattgctcaagagtctaaacgatattggcagaatttggaagcaaatgtacctggagcgcaggtacttggtaatcaaataatgcctggatttcttaatatgaagataaagtttgtgtgcgcccagtgtctgagaaacggtcaagtcattgaaccagacaaaaacagaaaatattgtagtgcaaaagcaaggcattcgtggaccaaagaccggcgtgcgatgagagtgatgtc

SEQ ID NO: 635 - DNA, 1060 bp, Human
taatttgtaagttatgttagcgggatcctcaaggccttgctttgccccgtggagacgcttgctcggatgagctcaggaaacagtaccggctgcgtggcaggtctgggtgttgtgtgcgaggacgtggcctttgaacaccgctgtgttctcagaggtccttaggagatatttttttttgtcttagggggactgtgttaagttcagacaaatcatgctgggtgtgtagagagtgtgaaatacgtcagtgaagtaagtagcagtgagcgattgtgaatgtgtaatgtaaatggaaaaccgggttttaccgtgttaagttattcactagggagccagtcgtagttctttgtaatcctctttcttccaaacctgctttgctgaaagttgcagaaaaggaagtgtgtggagagaaacagaacccttcagggtgggtcagaggacgccatccacagtggattcgtgttcgtttgcaggtggaagcagtgatttttaggacccactgattaaaaacaaacattcccaagtgtctctgagagatgctgtttatttgttaattaaaaagcttttttctctgtcttttaaattatggctttcatgtaataaggatatttttagtgaaaaattgttttcctttcaaattacagaccttttaaaaaaacttaatttgagcgagtaccttttcatttgacacttttcctgtttctaaccttaggaaaccagaatagcgtttggcagacacgacgttttcagtttacctttgacacctgccccactccattttgctttgtgatgtcttcatttaacaataaattatctgaaaaaaccgtctaaagtaatgtttctaaatagatacctcttcaaagttctccagaatatccaaagaagtcatcaagctgtcccaatccaaacgacaaggcctgggcgtatatggtctattatactatagacaaggtcatctataacaccttgggctttgtagctggagaaaaaaagtttaagtcaaccgctgttacaataaaaaaatttcagcatacccttatagtgcatagctaactttgaaagt

SEQ ID NO: 636 - DNA, 2438 bp, Human
gacgtggggacgcaggcgggtcgtagagagcgttcagccgtctgtatatctccccagatacctgaaactgaccacctgagtacgttttcccattgctgagctgtttccctgatatctggccatgcaacggagatcaagagggataaatactggacttattctactcctttctcaaatcttccatgttgggatcaacaatattccacctgtcaccctagcaactttggccctcaacatctggttcttcttgaaccctcagaagccactgtatagctcctgccttagtgtggagaagtgttaccagcaaaaagactggcagcgtttactgctctctccccttcaccatgctgatgattggcatttgtatttcaatatggcatccatgctctggaaaggaataaatctagaaagaagactgggaagtagatggtttgcctatgttatcaccgcattttctgtacttactggagtggtatacctgctcttgcaatttgctgttgccgaatttatggatgaacctgacttcaaaaggagctgtgctgtaggtttctcaggagttttgtttgctttgaaagttcttaacaaccattattgccctggaggctttgtcaacattttgggctttcctgtaccgaacagatttgcttgttgggtcgaacttgtggctattcatttattctcaccagggacttccttcgctgggcatctggctgggattcttgttggactaatgtacactcaagggcctctgaagaaaatcatggaagcatgtgcaggcggtttttcctccagtgttggttacccaggacggcaatactactttaatagttcaggcagctctggatatcaggattattatccgcatggcaggccagatcactatgaagaagcacccaggaactatgacacgtacacagcaggactgagtgaagaagaacagctcgagagagcattacaagccagcctctgggaccgaggaaataccagaaatagcccaccaccctacgggtttcatctctcaccagaagaaatgaggagacagcggcttcacagattcgatagccagtgaggtggcatcttgggaagacatggcctattcgtgtaattattgcccatttggctcattccccaagcccctaattcattttaattcattttaaacaaaagcagagtacaccggtattgctccagatcgctcacatcacctgggacagtcccatggcccctatgagtcaactcacagcttgcggggagtgggccttctcctggccttgttcttgctcataaacaggtcacttcctccatgaagagaccagtttccacgctcccatctctcactgctgactcagcgatgcctctgcctcggtctgcttttgaagactgtgaccttcaccaggaggttttacttacaccagtcgggaagattagtccctcattctgcctggagtgccccgtgtttgacttggcagcgggtgtggagccatccccgcgtcctcctggcgcattgccactgtggctgtccaggaacaggatgtggctgccttggccgaatgttgtcctactctccccaaccccggcgcctcagctcctcagctcctcgggcccctgcgtctggctggtgtttgcagggctttcgctctgctctggtattgctctgcctttatagaaagtcttattgaagaagtgtaagaaagacctaaggtggggaagactcctacacacaccattagtatcagtgacaccagcaatgtaggttcccagccccttcccagtggcagcttgtgtgtccaggagataggacatcatttaacgcatcagcaaagtagcagcagatgccacatacagagtagagcgaaggcatttggtggatcggtcactagagatctatcttgcagaaagtatgtttttcctcataaaagtgcctcttaattggccattgtaccagccacttgtcctagccaaatgtccaaaacacgcccttgggccccgccacgttacaatccacagattgtctgtctgagtcgtttaaggcatttcctggtgcttgtgttccatgaataaaaggacaaagtcagaagatcactgatgtcttactgtcaacagagatattttaaaagagagaagcaggaaaagatcttccttttttgatctacaacttatatagttttctgattatgcacataatagatatgccttccagatgcataaggcaaacatctggaaagaaatatacccaaatcttagcaggggttatctttgggagtggagtacatgggattttgctttcttcatttttataactttatattactgtcttggaagatgtgtttatgtgtgtgtgttacttttacaatcaggaaaacatattcaataacatatagtcaagaaaacagacttaaaaataaatgctatgtgtccattgaaaaaaaaaaaaaaaa

SEQ ID NO: 637 - protein, 315 aa, Human
MQRRSRGINTGLILLLSQIFHVGINNIPPVTLATLALNIWFFLNPQKPLYSSCLSVEKCYQQKDWQRLLLSPLHHADDWHLYFNMASMLWKGINLERRLGSRWFAYVITAFSVLTGVVYLLLQFAVAEFMDEPDFKRSCAVGFSGVLFALKVLNNHYCPGGFVNILGFPVPNRFACWVELVAIHLFSPGTSFAGHLAGILVGLMYTQGPLKKIMEACAGGFSSSVGYPGRQYYFNSSGSSGYQDYYPHGRPDHYEEAPRNYDTYTAGLSEEEQLERALQASLWDRGNTRNSPPPYGFHLSPEEMRRQRLHRFDSQ

SEQ ID NO: 638 - DNA, 381 bp, Human
  unsure 154: unknown base
  unsure 155: unknown base
  unsure 270: unknown base
tttgtaatcatgccactcactaacgattttatttctgtagcagaatcattttttctatgtaaggtgttaatgtgtgtgtatgtgctttggttgtaggaaaacttgaaaattccaaaatccttattttcctatttgagaggctggttcagcaggnngtgtgtgtgtgtgtgtgtgtgtgtgtgtatgaatggtatatttattacattattttgaaagagaattagtgtgttatgtggataatgttatatacagccaaagtggatgtttctntttggcaaggaaggtaggatttctgaaactcaggccttaaccaataggttggaagacaagaccaattgaagagttaggaaatgtgagtttttgttacttctgttattccag

SEQ ID NO: 639 - DNA, 6597 bp, Human
  unsure 6338: unknown base
  unsure 6339: unknown base
  unsure 6340: unknown base
  unsure 6341: unknown base
  unsure 6342: unknown base
  unsure 6343: unknown base
  unsure 6344: unknown base
  unsure 6345: unknown base
  unsure 6346: unknown base
  unsure 6347: unknown base
  unsure 6348: unknown base
  unsure 6349: unknown base
  unsure 6350: unknown base
  unsure 6351: unknown base
  unsure 6352: unknown base
  unsure 6353: unknown base
  unsure 6354: unknown base
  unsure 6355: unknown base
  unsure 6356: unknown base
  unsure 6357: unknown base
  unsure 6358: unknown base
  unsure 6359: unknown base
  unsure 6360: unknown base
  unsure 6361: unknown base
  unsure 6362: unknown base
  unsure 6363: unknown base
  unsure 6364: unknown base
  unsure 6365: unknown base
  unsure 6366: unknown base
  unsure 6367: unknown base
  unsure 6368: unknown base
  unsure 6369: unknown base
  unsure 6370: unknown base
  unsure 6371: unknown base
  unsure 6372: unknown base
  unsure 6373: unknown base
  unsure 6374: unknown base
  unsure 6375: unknown base
  unsure 6376: unknown base
  unsure 6377: unknown base
  unsure 6378: unknown base
  unsure 6379: unknown base
  unsure 6380: unknown base
  unsure 6381: unknown base
  unsure 6382: unknown base
  unsure 6383: unknown base
  unsure 6384: unknown base
  unsure 6385: unknown base
  unsure 6386: unknown base
  unsure 6387: unknown base
  unsure 6388: unknown base
  unsure 6389: unknown base
  unsure 6390: unknown base
  unsure 6391: unknown base
  unsure 6392: unknown base
  unsure 6393: unknown base
  unsure 6394: unknown base
  unsure 6395: unknown base
  unsure 6396: unknown base
  unsure 6397: unknown base
  unsure 6398: unknown base
  unsure 6399: unknown base
  unsure 6400: unknown base
  unsure 6401: unknown base
  unsure 6402: unknown base
  unsure 6403: unknown base
  unsure 6404: unknown base
  unsure 6405: unknown base
  unsure 6406: unknown base
  unsure 6407: unknown base
  unsure 6408: unknown base
  unsure 6409: unknown base
  unsure 6410: unknown base
  unsure 6411: unknown base
  unsure 6412: unknown base
  unsure 6413: unknown base
  unsure 6414: unknown base
  unsure 6415: unknown base
  unsure 6416: unknown base
  unsure 6417: unknown base
  unsure 6418: unknown base
  unsure 6419: unknown base
  unsure 6420: unknown base
  unsure 6421: unknown base
  unsure 6422: unknown base
  unsure 6423: unknown base
  unsure 6424: unknown base
  unsure 6425: unknown base
  unsure 6426: unknown base
  unsure 6427: unknown base
  unsure 6428: unknown base
  unsure 6429: unknown base
  unsure 6430: unknown base
  unsure 6431: unknown base
  unsure 6432: unknown base
  unsure 6433: unknown base
  unsure 6434: unknown base
  unsure 6435: unknown base
  unsure 6436: unknown base
  unsure 6437: unknown base
  unsure 6438: unknown base
  unsure 6439: unknown base
  unsure 6440: unknown base
  unsure 6441: unknown base
  unsure 6442: unknown base
  unsure 6443: unknown base
  unsure 6444: unknown base
  unsure 6445: unknown base
  unsure 6446: unknown base
  unsure 6447: unknown base
  unsure 6448: unknown base
  unsure 6449: unknown base
  unsure 6450: unknown base
  unsure 6451: unknown base
  unsure 6452: unknown base
  unsure 6453: unknown base
  unsure 6454: unknown base
  unsure 6455: unknown base
  unsure 6456: unknown base
  unsure 6457: unknown base
  unsure 6458: unknown base
  unsure 6459: unknown base
  unsure 6460: unknown base
gaccagtcacaagtttattctgtaatttttctttaacaggtattcaattctgtagaaaattgcaaatatttatttttaatatttacatttgggtctgtaaacaaagctggtaaaaaaatcctaagaatttccatacatatttataaaaatttcaagaatatgatccttatcacttctgaaaagtatgcattttttaaattctaaaagccagtaaatgtagaagttgaaggggacgagaaaaacgctgttaacagattatctgaattttcctcttcccaaatatctaaaacattgcatataccactcttttctgtgtagcttgtgaaacccaaaaattctgatttctcttcactagtctgaaacaagtctagtaaagactgtaccggtgaactacaaattctgttttcttcttgtgtaataaattcagttcttttatcaaattcagcatttggttccagattttcttttctatttcgtcctaatattattttcacttttcgatgtattttaccagaaggtaaactatccatattcttgaagtcacattcattgggttcctcaggaggagtatggaatggagcctttgcctgaacagttaggtgctcttgtgaactgtttattgttatcagaccagaatcatgagtaaatattgaatgaaggtccttttccttgagatcctttgctggaaaaagcacagtatctgacttctgttttggttgagatccactattatctgtactgaaatcagaaacatgtacagatgcctgtatgttacatttatagtgatctacccttagttcttctaagtcattttcacttaatgtgtgttcggaaatgtcaagaatgcattcctgtttgtttttatgtagaggtagctgtgtaaaattctgtcttatgtcatcttcagctgtacttaacatggaacatttattactcattttctcattaagccctctcaattcatttgaagggtgggggatgggctctgaaataaacaggagctttttttcagtttcctgggtctctttatacaggaaattctgctccttcactgttgtatcatcttcctggcaatctttctgagaaatatgttgcaattccactttttccttttgttcagtctttttcaggacacttgcagaaacaggagaaagggatccaacactgtattttattcttttctttttaggtgtgtccttttcatattccacaaagtcaaaaactaacttagatacaatatcatcaacaacttgatactggttactctgtgcaaagtttctgtgttgctcacttagaaggtgagtttctagatcttcatatttctgcaagcaacattcacaatatccttttttcttcttctctttcaactggagttgaattgaggttccaccatacttatcgccatctgtttggattcttagtttaacctgagtttgcttttgcatactagatggcttgtctacatcaatggactgcagggctttggctcatatcttccacctttacaaaaggctttttgagtcttcctgttcttgttttttgtgcaccactaccaactcttttgcccccatctcttactgaagtacttgatttcttgagtaaatacaactcttttttcttttgttcaatgtagtatctaatgtcatcaatatgaagaatttttactccccatgacaaggcatttgataatatactatttgaaggaataaaatcatggtccttgatagctttttcaactaataattttcctctgcttaaacacactgtgtctggtgacttaaatgaacttccatcatggctgggatgaggtgaagtggtttctgcagtatatgcagattctggacttggtacaggagaaattcgacccaaggtttgtgcaaatttagcttccttcttatttgaaataagataactgatatctttgctgagaaattcttcaactcgccctcccagatccttaatgtccttttgaagtttttcagatatggtgacagaaggtaagtcaaggtaaaatacttttccccaaagtggcttacatttggatttttctggcctgttatcagttttcagagatttcagagatggtctgtttttttcatttttgacttggattccaccctggaaatgtcctttactgtggatcctcatggctccggagttcatggcagtcgcccggcacctacatgctgggtccggagaaagtgtcgcatcgggcagccgcgaaagcacggcttcccccggcctgttgacaggacggccgcctctctccttccgccagctacggcctctacgcagtagaggtaccgcgtctgcaggtcgggtttccggggccggatccggctccaaggcgcggaggaggaaggcgcaaagcacaaacgagtgggctgcggcggttgaagatttgaaaacgcgtcacgcggccgcggcgccgatacgcgcgccccgccccgtctcacgccacgcgccgtgccccgcctcgcgctcgcccctcgtgcctgccttctcgcgctgcgcgccccgccccctcacgccgccgtccttctcgcgcctcgctctggccctgcaggttgtgtttccgcctctaccccgcctccattccgttgctctctcagtctcagacccgggctctcggtccgccgcttcaggtcttggcgcagcctcagagagttggcgcggctctgtgttgaccaaacctagtggatgcagttagcgccggagcccggccccgcccgtcaccagggttattcccgccttctaggtttgccaggactgccggccctgcagctgccttctgccccaggtttttggctactgatgttacaaacaataaaatattggagcatagagttgaagaacagactcaaaccaggtttttatttaattagttaaaaatatggatcctgagacaaggggacaagagattatcaaagtgacacctcttcaacaaatgcttgcctcatgtactggagctatactgacatcagtaatagtgacacccctggatgttgttaaaattagactccaagcccaaaacaacccactccccaaaggaaaatgttttgtatatagtaatggactcatggatcatctatgtgtctgtgaagagggaggcaacaaactatggtataagaagccaggaaatttccagggaacattggatgcattttttaaaatcattcgaaatgagggcattaaatctctatggagtggccttcctcctaccctagtgatggcagttcctgccacagttatttattttacctgctatgatcaattaagtgctcttctgagatctaagttaggagaaaatgaaacctgcataccaattgttgctggaattgtagccagatttggtgcagtaactgtgataagtccactagaattgattagaaccaagatgcagtccaagaagttttcttacgtggaactgcatcgatttgtcagcaagaaagtatctgaagatggttggatttccctttggaggggctgggctcctactgttcttagagatgtacctttctcagcaatgtactggtataactatgaaattttaaagaagtggttatgtgagaaatctggtttatatgagccaacatttatgatcaactttacttcaggggcattgtctggttcttttgctgctgttgcaactttaccatttgatgtagtaaaaacacaaaagcagacacaactttggacatatgaaagtcataaaatttctatgcctttgcatatgtcaacctggattataatgaagaacattgttgctaaaaatggattttccggattattttcaggcctaattcctcgcttaattaaaattgctcctgcttgtgccattatgatcagtacatatgaatttggaaaggcttttttccagaaacaaaatgttcgaaggcagcaatactagtgatgctgtttcaacttgaaacaacaactatagccaaagaagatggagactcttaggcaagaatgtttttcaccattattctctcacaatgattttatgtctttctttcctataatttaaataaataatttcagctctacctctaaatcataattttaaaataaattttatcttatttttggtgatattgaaaaagatattctagaaatcaccaccattgagcattcttgtaaaaatagattactccttagcatcaaaagcagtctcttgaaagtttaatattatatgtttcagtgtaacataatcttactgggagtgtgttgaatacaccagaactttttgaattgtgtgctgaatgatgtacatagtctagaagaaaaaagcccaagtcttgtgcacatttaaatcgtgtacataagtatttccgtatttcagtaaagtagataaagcactcgttaaatagcattgtttacatcgaccaaatattgcctgtttcctttaattcaaatgcattaggttcccgcctccctctccttccccgccatgttgctgttttaaggcttcatatgtattaacatttctctgatcaaaattgtggctgttttccttatgaaccataatataatcatttgtgtgatgtacattgtgccatttttgatgactaaatgtctatatttctgccattcctgtaagagagggagttttttactgatagtagcaaatgttcacttcagtcaaacttgggtgttcagtggtaaaccatatagtatttagactggtaaaaatagtttgcacacaggaatagcctctgatttttagctctcttgtaatccaagtatcattgttcatggaattctctaggtcatttttattgtgttgttctaacaagacagattattgctacaacaatagttacaagatatttctaaaatatcctttgatttttactctaagtatggtagagtaagaggctaaacaagaagctgtttccttgaagacattgctttcagtcaccatacatgtctaaataatttagcttatcattcattctatgtaggaatgagataagaaaggatatgatggcaggaaaagaaatgctattcattttttatactttagttttattttcttaggatctatatcctatatatatatattttttaaagcactaatttattgcagtctttattttagaaaaatgtgaagcatttttttctcccctaaaatgaatatatttagatgacaagtctttagtgctggtagaggaactaattgattttgtactatagtaggaaagtgtttatatgtttcaccagaaataaaatatgtagggtttgtatgtaatcttctgtgtttatcctatgttgatttaccttaaatttgcaacatacatatccacataaatattcatgactttcttatatttcattaaaatgttttatggcttcttaaaatcatcactgtgcttctaaatatttttacgtaaaatcattgtataatgctatactgtgatatacatgaaagtttatcttgaacagtgctctttaacaatattaaatttaaatttatcttggttttgctatgcttatgggtaattcatagaaaacagaaaaaatactgttcccaaaaggcagttatatatttcagtttaatatcacctataagtatgagaaaggtttccatgtctcctacccctcactgcacttaggaaaattcttatttatgaataaagtaagataagtaaatctaattgcctagtcgtttttttaacacatatacatgcaatgtatctggatgaatagaaggctgaattgaagctttctttatatttaagaggtaaaaagaaatattaatacttttaaaatatactaacaaccaaaaagtgttcagaattttgctataataataatttgtattaaaatagtacctagaaaaattcagtctatggaataggtaaaattttaaaattttaatttgctctcagagttctgtctgataaaataattgaactataattggcatgatgaatattcccaggttttacttcagtatataaatttaactctcagccacatgggctttccagacttttcaatacatatgatgttgcaggaattgcaatatttgcaaacatgtgccacaacagtgttcttggtgatgtttctaaaacagtttttattctattaatgttaaattttctaacataaacatttaattgattaatgtaaaattttaggaaggaacatctttaattttcaatatgagatggttgcaacctttaaagtagtacatatttgattttttttaaaaggcaatatttttttttctaggaaaactattcattatggttatttaactgcatatgttttttaaatttttccctcttgggaacaacatgtactggggcctatcaaagggtggagggtgnnnnnnnnnnnnnnnnnnnnnnnnnnnnnnnnnnnnnnnnnnnnnnnnnnnnnnnnnnnnnnnnnnnnnnnnnnnnnnnnnnnnnnnnnnnnnnnnnnnnnnnnnnnnnnnnnnnnnnnnnnngtacccctaaacttaaattcttccctctttttgtcttgggcacaagtttttgggatatggaaaagtttattgtatcccttttgaattttcttctaagatgaactttttaaataaaagatattactgcttttatattt

SEQ ID NO: 640 - DNA, 1836 bp, Human
ccggaaggcacggcgctcagctcaggaccgcgcgccgtggtctgaggtccgcggcagggtcccgcatggcggcgcacaggaagcacgtgtttgtggagaaggtgctgcagagactttttcctcctgttccaagtggccaaggaaagagggaaccccagacgctggccgtccaaaatccaccaaagaaagtgacctctgagaaagtgagccagaaacatgctgagcctttgacagacactggctctgagaccccgactgcccgacggctctacactgccagcgggcctcctgagggctacgtcccctgttggccggagcccagcagctgtgggagccccgagaacgcctccagcggggatgacacagaagatcaggatcctcatgaccagccaaagagaagaagaattaggaagcataaatcaaagaaaaaatttaaaaatcccaataatgttcttatagaacaagcagaattagagaaacagcagagtctgttacaggagaaatctcagcgacagcacacagatggcaccacaataagcaaaaataaaaaaaggaaactgaaaaagaaacagcaaattaaaaggaagaaagcagccggcttggcagcaaaggctgctggtgtcagtttcatgtaccagcccgaggacagcagcaatgaaggggaaggcgtgggagaggcttgtgaggaggatggtgtggacaccagcgaggaagacccgacactggccggggaggaagacgttaaagataccagggaggaagatggtgcggacgctagcgaggaagacctgacacgggccaggcaggaagagggtgcggacgccagtgaggaagatccgacaccggccggggaggaagacgttaaagacgccagggaggaggacggtgtggacaccattgaggaagacctgacacgggccggggaggaagacggtaaagacaccagggaggaggacggtgcggacgccagcgaggaagacccgacatgggctggggaggaagagggtgcagactccggggaggaggacggtgcagacgccagcgaggaagatgatacaattaccaatgaaaaggcacacagtattctaaattttttgaagtcaacacaggaaatgtatttttatgacggtgtctccagagatgcagcttcagctgccctcgcagatgccgctgaggagctgctggaccgcctcgcgtcacacagcatgctgccctcagacgtgtccatcctgtaccacatgaaaacgctgctgctcctgcaagatactgagagattgaagcatgctctggaaatgttcccagaacattgcacgatgcctcctgaccatgccagagtaatctcagctttctttagttactggatcacacatatccttcctgagaagagcagtgactaaaatggaatatctctttaagaacagctcctctttaacaaaaaaacttaaaagacaaatgtgagatgggcttagagttagttctctgggaacttgaaagacatttatgccatattatttattcacgtgtttgttcctggtgggcaagatgccatctgaggcttcagatgagaaattggggtaaaatggaaatttttcacttatttgcaattatatatatcttgaattactacataaaacttgattctgtttctctacttattgtaaaaattgaaaatggacattctgttaagttaaatgtatagtttgaagctcatatatttttatgaagttttgaatcaccttgtatctgaaagtctctgctttaagaatgctttctgggtattaaaatgttctagtttaagtaaaaaaaaaaaaaaaaaaaaaaaaaaaaaaaaaaaaa

SEQ ID NO: 641 - protein, 443 aa, Human
MAAHRKHVFVEKVLQRLFPPVPSGQGKREPQTLAVQNPPKKVTSEKVSQKHAEPLTDTGSETPTARRLYTASGPPEGYVPCWPEPSSCGSPENASSGDDTEDQDPHDQPKRRRIRKHKSKKKFKNPNNVLIEQAELEKQQSLLQEKSQRQHTDGTTISKNKKRKLKKKQQIKRKKAAGLAAKAAGVSFMYQPEDSSNEGEGVGEACEEDGVDTSEEDPTLAGEEDVKDTREEDGADASEEDLTRARQEEGADASEEDPTPAGEEDVKDAREEDGVDTIEEDLTRAGEEDGKDTREEDGADASEEDPTWAGEEEGADSGEEDGADASEEDDTITNEKAHSILNFLKSTQEMYFYDGVSRDAASAALADAAEELLDRLASHSMLPSDVSILYHMKTLLLLQDTERLKHALEMFPEHCTMPPDHARVISAFFSYWITHILPEKSSD

SEQ ID NO: 642 - DNA, 1442 bp, Human
gcgtgaggcaccgcggctggcctgagtttcttcttaatactgtatcacaattgtgggctgtcttatgtgttgatatcgattgagctatttgaaataggaatgttaatgggtgtattaaatttttgtaaggatataacaatatctaccttccaaggatgttgtgaggttttccatgattttgtatatgagctaatgttacctttgaggggtggtgtgcattatgttggatgattgtaaattttcagtggaaaatgtaccgtgtcctaaatttaaagacatgaaaaatatcccaagatcatactagatcataatagcaattcctttacaaatgaattatggaggtaactgatctctaacagtttccttcatgttgttttaatgcacaagggcagaggatctgctgacccttggaaccagcgtgagctaaccacgtgctatagacacttcatggtgtcgcacccagggaagtcaaagcgctttgctccctcactgtctgtgagtcctcagccattagtaccccaccccccgctgctccaaaacttgagttatttcaaatgtttctcactgttcatctctccactgaccccactccagaaagcctggagagagtcccaagatgccacccaccttccccaatccctcgccacagatctgtgtctatctcacactctgtaagtgccgctttgcttcttcctctcttgaaaagactgagaacacacattttaacatgttaggaaaatggggcagcctaaaaaatgactgatcccaccgccagtgactcatgtatactccaggctagcagacaaggccctttttggtgggcctgcttctgtgggttcacagaaaccaaattactgtgggttgcaaagaattagcaggtcatttacaaagcagacatcccttcacccagactgtggttttgcatgctcaggttctcagtctatgagctttggtgcaggatcattttggctactggaaaaaccatagcttattttaaatttctggttgccaaagccaccacacgtgtggtctgtggatgaccattgtctgcagaatgacgaggaaggaacagaatgtggtttggggctcagggtggccttcccactgggagggaaggcgggagggagcccttgccctgggttttgacacagcctgtgctcacagcctctcctctcatctgcatttctcagaaatgccctccctgcccagtggtgactttccctcgtcactcctatggagttctacctggagcccagccatgtgtggaactgtgaagtttactcctctgtaaagatggtttaaagaaagtcagcttctgaaatgtaacaatgctaacccttgctggaaccctgtaagaaatagccctgctgatagttttctaggtttatcatgtttgatttttacactgaaaaataaaaaaatcctggtatgtttgaaaaaaa

SEQ ID NO: 643 - protein, 84 aa, Human
MTIVCRMTRKEQNVVWGSGWPSHWEGRREGALALGFDTACAHSLSSHLHFSEMPSLPSGDFPSSLLWSSTWSPAMCGTVKFTPL

SEQ ID NO: 644 - DNA, 3458 bp, Human
gggtctgcgcaccttcccggcccagccggcgattcattcaaaaggcgcgcaggctgcgcggctgtccgggcgctcgccgagccgggccgcggcgccgagtcgaacggggagccgagctggagctgccgcggcgcagccaggccggcgaccaccaggggcctgaggatgaagccaagtctgctgtgccggcccctgtcctgcttccttatgctgctgccctggcctctcgccaccctgacatcaacaaccctttggcagtgcccacctggggaggagcccgacctggacccagggcagggcacattatgcaggccctgccccccaggcaccttctcagctgcatggggctccagcccatgccagccccatgcccgttgcagcctttggaggaggctggaggcccaggtgggcatggcaactcgagatacactctgtggagactgctggcctgggtggtttgggccttggggggttccccgcgttccatgtcaaccatgttcctgggcacctctgggtactcatggctgtgatgagtgggggcggcgggcccgacgtggcgtggaggtggcagcaggggccagcagcggtggtgagacacggcagcctgggaacggcacccgggcaggtggcccagaggagacagccgcccagtacgcggtcatcgccatcgtccctgtcttctgcctcatggggctgttgggcatcctggtgtgcaacctcctcaagcggaagggctaccactgcacggcgcacaaggaggtcgggcccggccctggaggtggaggcagtggaatcaaccctgcctaccggactgaggatgccaatgaggacaccattggggtcctggtgcgcttgatcacagagaagaaagagaatgctgcggccctggaggagctgctgaaagagtaccacagcaaacagctggtgcagacgagccacaggcctgtgtccaagctgccgccagcgcccccgaacgtgccacacatctgcccgcaccgccaccatctccacaccgtgcagggcctggcctcgctctctggcccctgctgctcccgctgtagccagaagaagtggcccgaggtgctgctgtcccctgaggctgtagccgccactactcctgttcccagccttctgcctaacccgaccagggttcccaaggccggggccaaggcagggcgtcagggcgagatcaccatcttgtctgtgggcaggttccgcgtggctcgaattcctgagcagcggacaagttcaatggtgtctgaggtgaagaccatcacggaggctgggccctcgtggggtgatctccctgactccccacagcctggcctcccccctgagcagcaggccctgctaggaagtggcggaagccgtacaaagtggctgaagcccccagcagagaacaaggccgaggagaaccgctatgtggtccggctaagtgagagcaacctggtcatctgaggggcggtctagtctaaggacactgcggccctgccctgggaggttccgaaggcttcctggaggaggtggagctgcagctgggactgtgaggaccgagaagcaatggcccagcagacgagacagcaaagaccaaggcctggaggtgggagcgtctgccccagtgaggaggcaggtggccggcgggcactgtgtacaggagcaggctgagccccgcccctggccctgctgccatgttgctcccctgaaggatgccccgacccccgtgcctgccctggctggatcctaggagcccacgggattctctgtatcatcagaggctgggcttggcagaggggaggggcctgtgcccgtcacccctggccccattccttggtaattagccacacccttgcctctgtacagggccctagagcagatgtgcgtccccctcctcttccagcaggtctataaagggaaggggtagcagaaagtcctgggctaggagagtgagtccctgggttctaatcttgggcacatctgtggccatcgctgggtccatttttctgactgtgaagtaaggagagacgtctcagtacccagggcctcttcagctctttgtaggttctgggctgggttgtgggggactggggagctgggctctaccatccctcccattagtagctttatccagccccgtttttgctgcttccagggcctctgccttcaaggcccccatggggctgtccatccatggctctgcctacggaaggggcttaatgcatgtgcctgcccctcccccagctgtttttaatgaaactgaaaaaatagacttgatcccggcaggactgtgatacagagccctagcctgcccagccagccccaagatctcaggagctttagggagaagacttggtggggctggagcacaccttgggcctcagtggtttctgtgtccctgtggtgccagtgcttctgggcagtgcaggcggctgccaggcccagccctgacttccactctggctcagcaacctggttatttatgtggggccgtgcaggcatgggcccactgcctgtccatcctgtttctcttatttattgaaactcaccattgccctatccttgtgtctccacccccttccatgtgttgaataataaaaggtgggaaagtgctgtcacgaggagctccttttctctgtgcccttcccagcttatccgcctgttccacttgtacctgtccagccctgccctgtgttgggcaccgtgacaggctgccctcccctcacagttcctgcacctcagcagccagggaagcagggcccagaggagacccatcaactcatctggttctcaccaaagcccctagctagaggcagggctgtcccacagaaatagtgtgagccacatatgtgactttaaattttctgacagtcacatttcaaaaagtaaaaagaagcaggtgaacttaatttttttttaacccagtctatccaaaatattttcatttcaatataaaatcagtataaaaagtgtgaatgagctgtttttgcttttgctttgaaatctggagtgtatcttacacatcttgattggaactcaaatatttcaagggctccatagccacgtggccagcagctaccacactggtcagcgcagcacctgaggaaatgcactgtgtggagcccgggaggtaattgggggtgaggaagatgtgcgggccagggaatgtgttccacagagagggacagcatgtgcaaaggctgagcaccaacacatagtggtcacctgggccttatgcccagggagcctccaaagcattcagctcctgcttggccagtgtggagaggaaaggagccacaggagcgggtgctacacccggcaagacagagcgtctccatctaaaattcctagggcaagcttccaacccggcccaagggccgcatgtggcccaggatatggctttgaatggggcctaacacaaattcataaactttcttaaaacattgaaaaaaaaaaaaaaaaaa

SEQ ID NO: 645 - protein, 430 aa, Human
MKPSLLCRPLSCFLMLLPWPLATLTSTTLWQCPPGEEPDLDPGQGTLCRPCPPGTFSAAWGSSPCQPHARCSLWRRLEAQVGMATRDTLCGDCWPGWFGPWGVPRVPCQPCSWAPLGTHGCDEWGRRARRGVEVAAGASSGGETRQPGNGTRAGGPEETAAQYAVIAIVPVFCLMGLLGILVCNLLKRKGYHCTAHKEVGPGPGGGGSGINPAYRTEDANEDTIGVLVRLITEKKENAAALEELLKEYHSKQLVQTSHRPVSKLPPAPPNVPHICPHRHHLHTVQGLASLSGPCCSRCSQKKWPEVLLSPEAVAATTPVPSLLPNPTRVPKAGAKAGRQGEITILSVGRFRVARIPEQRTSSMVSEVKTITEAGPSWGDLPDSPQPGLPPEQQALLGSGGSRTKWLKPPAENKAEENRYVVRLSESNLVI

SEQ ID NO: 646 - DNA, 3342 bp, Human
gatatcctggactgacccaggggaaggaagtggggaaggggcgggagggacaatctgagagtgactggggagcctttggtgtttggggtttcttgaagtgggaggagtgttgagtaagttggtctttcccggtgctatacttgcatcctctccacggaagaattgttcaggagatgcgcttggggtgatgacttccttaaatacacgctgtagggggtgaagagcttggaggaccaggcgctttgaggaccttgaggaagggcagttcgtgggctggggtgggaacaggatggcgggcaatagactagggtaggccgcgatgacctgtagaaggttgcggggagagggtttaaatgagggttatggggcgaaataaaaccaagtataagtgattctatcttggtcccaccaagagtttgcccgatctccacacatcacctgttgtctcacaaaaagtaggggaaccttgtcagtcacataggacaggatatttaatgtacttttcctttctctgagccacagttagctgctattttgaggcatccaagggaaagtgggctgaaaaacgccacactcatttcaaggggcaatgtctggggtttagaaattcatttataactggttctctgatgtgggaaatcctgattctgtcccgggttctttgctacttccttgaaaatactctagcttcatgctgggtcaaggtggtttacctggatgacccccctcccccgccctcgccccatcccaggtgtgtgccacacccagtatttctttcaggtctcaactgtggtgttttaagtgcagggaaaaggaacaatcacagctatgtgtgactttccttttcccacctcaccttgatgtaggtgtttcaagtgaactttagaccaacagttgcccagtgacctgctaaaaagtcaactagctcagagttttgctggcctttatgtgagaaatccaagaaagtgttcacttttttgggatgcgagactccttggtctcatttgccttcactttgcatttgttagtgacctccactaacccccacttccatgcatattgacgagggatctagtctaagtaagaatgtcttttgcctgcgcgtggaggcacagtagaaatctcaaggctttacccagaagagcccagtcagggagaggtgtaaatgcaaaattgccaaatagcacaaacaatgaatgttttctggttgttatatagatgccaaaatagcactttgatatttgcaaagtgctttatgctttttaataattgttagctgtttctcacatcattgtgagttagatcagtattatgaccgctgtcttagggaaggcctgggaacaggagtgtgcaggctgtcctgaagagaggctgaggacagtgtgaataattgtagcctgaccttttgcattctccagctcagctgctaggaagacttacttgtcatgatttatataacaaaattaaggacactgaaaattcttatgcttgatgaaaaacttaaggctagcctagaagggccaaacatgtccttattgacaaagctggtctttgtcgcctaattagggtatcctagctatgttccatttctagtaaggggctgtagttagatgactcttgtatagatttcagttacttatgctgaagatccctgtgctaggttagcctttagaagttagagttgtggaaagcagtattgttttcttctctagtgattgttaccctacacatttcatggaagcatcttcacaaaatatcggacacagtggaagggggaaaaaagctacgagattgtttttacacttttagcaaagtttctgtggatgctagtaatttatacttgatcagttgtattctagtaaagaacctctttggggactgtaggaaagcatgtttttgtggttataaaaacacttaaaaatcctgataattctgggcttgtataatgcctgttgatcttgccctcttaatcagtttattgttattcacaaatgcaaataggttttcaaactacagacagttttgaaagacattaattcttgttttcttctagtcaggagtaatacaagcaaacaagtgtccgttttgaattctgatttgtaatctgaatactaaacatattagacccacctgaaaataatatagccaatttctaggtaatcttactgctttgtgggtttctttccatgtacatctacctcttccagctgttttaagttttctcaagtctgtgcctatgaaatctcatccaacttttgattattcatggattgattatccgcttttttttttgcttttttgctgccattgctatgcctggtctcgtctgcatcaaatatactacatatcagcaactttagagaatgggttcaacagggagtggagagtgaagctaatgtaaaatagtttagtggcagtgggaatctttggacttcatttacctctctcattatttctattaccatggataaaaaagtcagctgctacgttgatatcccttctgtgagcacattcttagcagaagaaaacaatccaactaccaacacccgactctattggtgcatttaaaatgtgattccattttttcttacaattcttcagggaacttacctgcattaagtgaggttaaatgcattcaggaggttgtttcttctatctagttttagaataatatttcttcggcaaaccctgctaactgcggttcacccttgaaaacgttaatctgaggactttttccaccaactcattaatgatggtggaagcaagtgtattatttgtttcctggagaatttgatgaagagcagtcttcctctgctgccctttactaagcaaaacctggagcagtttaaataggctaaatggttttgattaaatcttgagctccgagttggaaggagaaaatgagaagttaaccccttgagccatgtggtctctttacaatcaagagactgtacatatgtgaaaaaatacaaattaaggacctgtgttcatagacaatctaaactgtgtttctgaagtttgtgcacatttttcttcactgtaatgttattttacagctgtttgttaaaatagtgaataatttaatgatcctaaaagtaacaggtttcgtgtgagtgtgcttgtatacgtgagaattgccttattttcaggttgttttatttaacgatggttccttggacagcattctggtgttcagcaaccaatatggaatatttgtcattaaatccatatcagtcttttaccatgtcattcttctttgccacacttaaatgtcactcagctctaaaaaaaatctattcggtgggagaaagagtaatgaaatgcgaattcgatatcagctat

SEQ ID NO: 647 - DNA, 513 bp, Human
  unsure 44: unknown base
  unsure 49: unknown base
  unsure 65: unknown base
  unsure 66: unknown base
  unsure 69: unknown base
  unsure 80: unknown base
  unsure 83: unknown base
  unsure 127: unknown base
  unsure 332: unknown base
  unsure 336: unknown base
  unsure 447: unknown base
tcctcaagtcggcctggaagtgggcctggaagagcagcaagtcngcctncccgggcccagctccnnccnctcggcggccnctncaggtgcaaaacttcctcgagtcagcctctccaggcccagctcntcctgcctcccagtggcctctttcggcccagcccagttcatggctctcggcggccttcccaggccccgcttttgacttttggcagcctcttcaggcgcagaacttgatctccagtcggcctttgcaggcccggcctcctgcctctcaaaggcctgcacgggcccggccttggccttggcctcacagtggactctccacgcccagntagntctcgcctcactgcggcctcccccgtccaaagctcctgcctttcggccacttcggcaggtccagctactgcctgccagtggcctctttaggccaagctcattcctcacaanggcctttccaggccccgtttttcccttccggcagcctcttggcctctaatttgtttatcttttgtg

SEQ ID NO: 648 - DNA, 1358 bp, Human
ggcagagggaacaaacaaacaaaaaaggcaaaattggagctgtccaggccaggacaccccgatgtccaggggcttccatacgaacaggcacatgggctgggaagtacatgaggcccctgggtagaagggtctgtcagttctctcctcccttgccctctggragggtcctcctaacatagcttccaggaggtgggaggagcagttactgtcagcaggtgtcagccaggtgtcagcttctcctggggatctctagatgtctgcttgtgatttttggcaagtatatgcaaatgagcctcctctcctgccctgagacaagtatctgcagtgtgaacctggcagcctcagacccaaggggctcagaggaaacttctctggtttctagagctctgtgctccttcagagaagtcttccttccttccagtcagtgtccctgtgaagctgggatactcatttcctgtgtaccgggcaaacaccggattgctgattttgagaaatgcctctcgatggacctgtaacctgctggagtctgggatggtagctgtgggctggacttggctgatgggatgacccggtggctagtgcagcatcacacaagcctggttcaagtcttggctgtgtcatttcctgctgagggaccaggcactgaatttcctacctcttagggtcattacctatgaggttaaagctacctcatgggattgttatacgccactaatgttgaggcagacacctcttggcagggtgactgctcatcttagaccctccccttttctgcgaatttgggccccttgatcctctgatgggagctgaaaggatgagaggtgggcatctagatttagggaggctgttcaggctttgcaggtcccttacctgaacacatagaaaccctggagctgtgactgtgtccatgtgtgtgtgtttgtctgtgtgtgttgcgggggatgggcacctgcatgaatgtggtagagaaaatggctctgctcagagggaagatacgcatagcaaggcagggaccagaggaatcacaggcgcctggagagcagccgggcaccgcctccagggacctgccggcttccctcagtcctccaggggcccagcactcttcctttaggccctgtgagcgtcccttgtcaggatacattctctcattttgctgaagctgatttgattgggtgtctgtttctcgcagccaaaagagctctgaatgaggaaagtgcttctgtgctaactccccgcgtctcctgaatttcagtcattcatgtacccgcctcgaaatttttgcaatatctgtgtaccaactgtccatttacttaataaagaagttttctttaaattaaaaaaaaaaaaaaaaaactcga

SEQ ID NO: 649 - protein, 32 aa, Human
MTRWLVQHHTSLVQVLAVSFPAEGPGTEFPTS

SEQ ID NO: 650 - DNA, 6873 bp, Human
tgaggggagctacgtagccgaggtttgcgctgccgccgccaggcccggtccggttccagcctctgcccggacgctagccggcctggccatggctgaccgcgggtgcccgctggaggcggcgccgctgcctgccgaggtgcgggagagcctggctgagctggagctggagctgtcggaaggtgacatcactcaaaaaggatatgaaaagaaaagggcaaagctgcttgcacgttatataccgcttattcaaggaatagacccatctctgcaagcagagaatagaattcctgggccctcacaaaccacggccgctgcacccaagcagcagaagtctcggcccaccgcctcgagggatgagcgcttccggtcagatgtccacactgaagccgtgcaagcagctttggccaaatacaaagagaggaagatgcctatgccttcgaagagacgttctgtccttgtgcattcgtctgtggaaacctacacccctccagacacgtcgtctgcctcagaagatgagggctctttacggcgacccgggcgactcacctccactccgctccagagccattccagcgtcgagccctggctcgaccgggtcattcagggctcgtccacctcatcctctgcatcctccacctcatctcacccgggagggagacccaccactgctcccagtgctgcagccacgccgggggccgccgctaccactgcactcgcaggcctcgaggcccacacccacatagatctgcattctgcccctcctgatgtcaccacgggcctcgtggagcattcgtactttgagcgtccacaggtggcttctgtgagaagtgttcctcgggggtgcagcgggagcatgctggaaacagcagatggtgtccctgtgaacagcagagtgtcctccaaaatccagcagcttctgaacaccctgaagaggccaaagcgccctccactgaaggagttctttgtggatgattttgaggaattgttggaagatccaaatcagccaaagcctgagggaagcgagacgagtgtgctgagaggggagcctctcactgcaggtgtcccccgaccgccgtcgctgttggccaccttgcagcgctggggcacaacacagcccaaatccccctgtctgactgccttggatacaactgggaaagccgtctacactctcacctatggcaaactttggagtcggagtttaaaactagcttatactctacttaataaactgacaagtaagaatgaacctctacttaaacctggagacagagtggcgctcgtgtttccgaatagtgaccctgtgatgttcatggttgcattttatgggtgtctcctggcagagctggttcctgtccccatagaagtgccattaacaagaaaggatgcaggcagccagcaggttgggtttctgctgggcagctgtggagtcttcttggccctgaccacagacgcttgtcagaaaggcctccccaaggcacagacaggagaggtggcagctttcaaaggttggcccccgctctcctggctagtgattgatgggaagcatctagccaagcccccaaaggactggcaccctctggcccaggacacagggactgggactgcctacattgagtataaaaccagcaaagaaggcagtacggtgggggtcacagtgtcccacgcatccctgctggcacagtgccgggctctgacccaggcgtgcgggtactcagaagctgaaacattaacaaacgtgctggatttcaaaagggatgctggtctgtggcatggcgtgttaacaagcgtcatgaacaggatgcacgtggtcagcgtcccctacgcgctgatgaaggcgaacccactctcctggatccagaaagtgtgcttctataaagctcgggccgcgctggtgaagtcgcgagacatgcactggtctctcctagctcagcggggccagagggacgtcagcctcagctcactgcgcatgctgattgtggccgatggtgccaacccgtggtcgatctcctcctgtgacgccttcctcaacgtcttccagtccagaggtctgaggccagaggtcatctgtccttgtgcaagttctcctgaggcgctgactgtcgccatccgcaggccacctgatctgggaggaccacctccaagaaaagcagtcctgtcgatgaacggtctaagttatggtgttatcagagtggatactgaagaaaagttgtcagtccttactgttcaggacgttggtcaggtgatgcctggagctaatgtatgtgttgtgaagttagaaggtaccccttatctttgtaaaactgatgaagtgggagaaatatgcgtcagttccagtgcaactggcacagcgtactatggattgcttggaatcacgaagaatgtgtttgaggcagttccggtcaccacaggaggagcacccatctttgacaggccattcaccaggacaggcctgctgggcttcatcgggcctgacaacctggtcttcatcgtgggcaaactggacgggctgatggtcactggagttcgcagacacaatgcagatgacgttgtggccaccgcactggccgtggagcccatgaagtttgtctacagaggcaggatcgctgtgttctctgtgaccgtgctgcacgacgaccggattgtcctggtggctgagcagcggccggatgcctcggaggaggacagcttccagtggatgagccgtgtgctgcaggccattgatagcatccaccaggtgggcgtgtactgtctggccctggttcctgccaacaccttgcccaaggctcctctcggagggattcacatttctgaaaccaaacagcgctttctggaagggacgctgcacccgtgtaatgtgctgatgtgccctcacacctgtgttaccaacctccccaaacctcgtcagaaacaaccagaggttggaccagcctcaatgatcgtggggaacctggttgctgggaagagaatcgctcaggcttccgggagagagctcgcccacctggaggacagcgaccaggcacggaagttcctgttcctggctgacgtgctgcagtggcgtgcccacaccactcctgaccacccgctgttcttgctgctgaacgccaagggcaccgtcacaagcactgcaacctgtgtccagctgcacaaaagggctgagagagtggccgcggctctgatggagaagggaagactgagtgttggggaccatgtggctctggtctacccaccaggggtggacctcattgccgcgttctatggctgcttgtactgtggctgcgtgcctgtcaccgtgcggcccccgcaccctcagaacctcggcaccacactgcccaccgtcaagatgatcgtggaggtcagcaagtctgcatgcgtcctcaccacgcaggctgtcacacggctgctcaggtccaaggaggctgctgctgccgtggacatcaggacctggcccaccatcctagacacagatgacatcccaaaaaagaagatagcaagcgttttcaggcccccctcccccgatgtcctcgcatacttggacttcagcgtgtcaaccactgggatattagcgggagtgaagatgtcgcacgcggccacaagcgccttatgccgctccataaagctgcagtgtgagctgtacccctcgcggcagatcgccatctgcctcgacccctactgtggccttggttttgccctgtggtgtctgtgcagtgtctactcgggacaccaatcagtgctggtgcccccgctggagctggagagcaacgtgtccctgtggctgtcggccgtcagccagtacaaggcccgcgtcaccttctgctcctactctgtgatggagatgtgcaccaagggcctaggcgcacagacgggtgtcctcaggatgaagggggtgaacctgtcatgtgtgcgcacgtgcatggtggtcgccgaggagcggcccaggattgcgctgacccagtccttctccaagctcttcaaggacctgggcctgccggcccgcgccgtaagcaccacgttcgggtgcagggtcaacgtggccatctgcctccagggcacagctggcccggaccccacaaccgtctacgtggacatgcgggcactgcgccatgacagggttcgtttggtagaacggggttctccgcacagcctgccattgatggagtctggaaagatcctccccggcgtgaaggtcatcatcgcacacaccgagaccaaaggacccttgggagactcacacctgggagagatctgggtaagcagcccccacaatgccaccgggtactacaccgtttacggggaggaggcgcttcatgccgaccacttcagtgcccggctgagttttggagacacacagaccatctgggcaaggaccggctaccttggcttccttcggcgaacagagctcactgatgccagtggagggcggcacgatgcactgtatgtggttgggtctctggatgaaactctggagctcagaggcatgcggtaccaccccatcgacattgagacctctgtcatccgagcacacaggagcatcgctgagtgtgccgtattcacctggaccaacctgctggtggtggtggtggagctggatgggctagagcaggatgccctggacctggtggccctggtgaccaacgtggtgctggaggagcactacctggtcgtgggagtggtggtcatcgtggacccaggggtgatccctatcaactctcggggtgagaagcagcgcatgcacctgcgggacggcttcctggctgaccagctggaccccatctatgtcgcctacaacatgtgagcgcagcacaccggcccaggtgccggagatgaatgagccccagcagtccaaggtgtgatgtgggaagacaccgcagagctcactcaccgggactcgcccttcctgtgctcttacagatccctctcaacaatccccgcatctccttttagaaagcacttcctgaattatttaaagaaatattttgaatctgccaagtacatttacaaaaacacggatgctggtattttaacagatggagagacaaggaaaggaaaggaaaggcctggcatgggcattgtgaggaatcacaggcaccgaggttgttctctgctgtactgcaagtttgcactttctttaggctaaaaatatagttcctgatttttaaaattcagttatttattcccacttcaaatgacaagttcatatatagaatttacgggagaaacttgagaccatttacggggagaaacttgattctgggaagatagcagagtacaaaccagctgcctcacttctgtttcacagggaggctgatggaaaaaggaagcaagctggacccatcctccctgctcacagagggcactgtggtcacacacagtgcctcctctgccagttcctttattgaaagaggtgtgctggctggccacggtggcttacacctgtaatcccagcactttgggaggccgaggcgagcagatcacgaggtcaggagaccgagaccatcctggctaacatggtgaaaccctgtctctactaaaaatacaaaaaattagccgggtgtggtggtgggcgcctgtagtcccagctacttgggaggctgaggcaggagaatggtatgaaccagggaggcggagcttgcagtgagccgagatcacgctactgcactccagcctgggtgacagcacgagatgccgtcttaaaaaaacaaaaaagaggtgtgctgcttgtcagcatgtattgtcacggacactcaataagtgccattttggactgtcaaatttagatgctttgtttcagaaagataagccagcatttagttttaaatcactttcctggtttgtaacttgatgctgtttagttaaattgctagttttcctaacactacaatattaattcttctcgtggaagtgtactgatttattatttttattccaagtcagcagatttggaagcattgtggtaaagtctaaggttttcatatccatagtgctgtttggtgagtaccggcagtacagttgaggggagcagggaacagcattgccccgtattgaaggtggagatggttacattcttcactgctttttgcattttgagttgtgtgcctataaaatttggccaaaccattttattattttgttcaaacttgactaagctgagtgatctaaaattatacagaacctaaatcaaagaagagaatgtaaagtcctttagttacttctaagaatttgaagtcaagcacgaatctaagacatagattatttttatatagctaatgaagagtatgttacgaaattgttgggtttttggggtattgagggtggcaaattttgtgaatcatgcatgcttcacagaaacaaccaggtttttccagaattagtctggatcagtgcctaacaaagctgttattaattctccacacatgagtctggctaactgggccagctctcatgttttactcctgtctggctacaaatagcactgtgcatagtagccctgtttccccatggtgttggactgtggtaaagtatgttgtgacatactggaattctaataatcctgttgtaagtatgtacagaatctatgtaacttattgttgacatacagaggtttgggaagtagtctaatggacattccttacaatagaatggctgggaagggaaagaaaaaaaaaaaaaaactacctaactccaatcttaatgttgtagttttatagcaaacaaaaattgtcagctttttgtattgaaaggtcagtggtggtaagacaaggtgtcttgtaaattaagattttaagaagtgcattaaaatgttttagaattactctgggaattctgtatatcacactaaaatttttatatcattatgttaataaaagttattgactt

SEQ ID NO: 651 - protein, 1567 aa, Human
MADRGCPLEAAPLPAEVRESLAELELELSEGDITQKGYEKKRAKLLARYIPLIQGIDPSLQAENRIPGPSQTTAAAPKQQKSRPTASRDERFRSDVHTEAVQAALAKYKERKMPMPSKRRSVLVHSSVETYTPPDTSSASEDEGSLRRPGRLTSTPLQSHSSVEPWLDRVIQGSSTSSSASSTSSHPGGRPTTAPSAAATPGAAATTALAGLEAHTHIDLHSAPPDVTTGLVEHSYFERPQVASVRSVPRGCSGSMLETADGVPVNSRVSSKIQQLLNTLKRPKRPPLKEFFVDDFEELLEDPNQPKPEGSETSVLRGEPLTAGVPRPPSLLATLQRWGTTQPKSPCLTALDTTGKAVYTLTYGKLWSRSLKLAYTLLNKLTSKNEPLLKPGDRVALVFPNSDPVMFMVAFYGCLLAELVPVPIEVPLTRKDAGSQQVGFLLGSCGVFLALTTDACQKGLPKAQTGEVAAFKGWPPLSWLVIDGKHLAKPPKDWHPLAQDTGTGTAYIEYKTSKEGSTVGVTVSHASLLAQCRALTQACGYSEAETLTNVLDFKRDAGLWHGVLTSVMNRMHVVSVPYALMKANPLSWIQKVCFYKARAALVKSRDMHWSLLAQRGQRDVSLSSLRMLIVADGANPWSISSCDAFLNVFQSRGLRPEVICPCASSPEALTVAIRRPPDLGGPPPRKAVLSMNGLSYGVIRVDTEEKLSVLTVQDVGQVMPGANVCVVKLEGTPYLCKTDEVGEICVSSSATGTAYYGLLGITKNVFEAVPVTTGGAPIFDRPFTRTGLLGFIGPDNLVFIVGKLDGLMVTGVRRHNADDVVATALAVEPMKFVYRGRIAVFSVTVLHDDRIVLVAEQRPDASEEDSFQWMSRVLQAIDSIHQVGVYCLALVPANTLPKAPLGGIHISETKQRFLEGTLHPCNVLMCPHTCVTNLPKPRQKQPEVGPASMIVGNLVAGKRIAQASGRELAHLEDSDQARKFLFLADVLQWRAHTTPDHPLFLLLNAKGTVTSTATCVQLHKRAERVAAALMEKGRLSVGDHVALVYPPGVDLIAAFYGCLYCGCVPVTVRPPHPQNLGTTLPTVKMIVEVSKSACVLTTQAVTRLLRSKEAAAAVDIRTWPTILDTDDIPKKKIASVFRPPSPDVLAYLDFSVSTTGILAGVKMSHAATSALCRSIKLQCELYPSRQIAICLDPYCGLGFALWCLCSVYSGHQSVLVPPLELESNVSLWLSAVSQYKARVTFCSYSVMEMCTKGLGAQTGVLRMKGVNLSCVRTCMVVAEERPRIALTQSFSKLFKDLGLPARAVSTTFGCRVNVAICLQGTAGPDPTTVYVDMRALRHDRVRLVERGSPHSLPLMESGKILPGVKVIIAHTETKGPLGDSHLGEIWVSSPHNATGYYTVYGEEALHADHFSARLSFGDTQTIWARTGYLGFLRRTELTDASGGRHDALYVVGSLDETLELRGMRYHPIDIETSVIRAHRSIAECAVFTWTNLLVVVVELDGLEQDALDLVALVTNVVLEEHYLVVGVVVIVDPGVIPINSRGEKQRMHLRDGFLADQLDPIYVAYNM

SEQ ID NO: 652 - DNA, 3076 bp, Human
ggttggtgttgtttggcatttttttcttttcctttttaaagaaaatgttttcaggaaacatgaacaaacatactgccaattatagtggggctgggaaggcacaggagctggcgacctctcagctgcatagttgggacggcaaaccctgctgtgagcttctcagacttttcacctacttcacctattaagaagccatgaggagttgtaaactcttgttcagggaagaaaagagggcaggaggaagtaacccaatgcctttaaatacaaaacagatgaaaaacaaaatactcatttttccttttctattgtgggtttggggagccaaaccaagtgtgactgtgagcacgttcactgagaggcatgacaacattattgaagaggtctttccattatgtctggttctcttattttcttaagtcaagccttaactatgaacatactttaagatgatacgggtctgtcaccataaacctgtaaaagggcatcgacagcttttcagataatccaggaatgttgagacatggctaagtttctagctgatacttagtcattccctcttgatattgttgggatgggtagccaaaaggcaggcttgtgggagttaagagccaatgatacctggaaacatgggaggtagctgggggtacaagtggatgttgagactgaaggaagaggtggaaagaagacacagaaggcacccagatgccaaaaggcctggcatgaatgagagttggcatctgtcctgttgtggtgttcccattcttgccatacccatttgcccagattgttctgattctcatgttcaattgactatcccacatgagactacagtttataggcagtgaggaattgtttcttcctgggaaatgtccttccagcaacttcagaggaatgggaaagtgttaatcttacgtgaagcaaaggagcctggactaggggcagagagaaagaagcagcagcccaccttctttgtgtttgcacatgtgcctatgtcgtgtacattggtacctgactgtggctcagatctgcgtcgcagcagcgagagaagaaatcactccatatccgatgagaggaagggtggcacagagatggtgtctacaattagagacatttctgactccaccttagcctaagcaaactttatatactgagtaacatttgaaggttgtcttttaatggtggggggtgttttttcctttttaaactacagtgcttgcacaagagagggagggactcagaaaaggttagggcaggtgagggagacagtagatggcctgggatgacttgagtccatcatactattgcttggcaggtgtcctcccccatgtttgattcaaattccatgagtgacctacctttccccaggaatgggactgagagggtagtctccagcaactcagtctgcacagggctccccgttcaggctgcctttggtggttgtgcttttgtaagtttctttctctgcacttcgacttacctctgaatcagaaagcaagcccagcaggtgaatgagggatgtctgcttggcattgcccaatctaaccagggaggctggctggccacccactgtccgctagaggggagagctagcaggtgttggtatgaactcaggaatagaaacacgaggcctttttaaatacgagggagaagaatccatgatgcatacctgtaaccccctagaacccaagtgccagaattcctagatgctgcttctgtttgaacaaaatgtcactgcttttacacttgaaaaaaacacactcgaaaaatgttcaactccatgaaaaatattttttggctttaagaaattgtttggtgtttaactgtttcctttgattgccattccaccagtaaattgttggttgatttgcactgcactctggggttggggttgggaggggagggtccttatacagagccgaacctggggttgctcaggaagtgggccagggaatgtggaagtcgttgacattgcctgggccaaaagagtgggagatagtttttctcccctcagcccactcctggtagcacctgtcgccagcctggtacaaagccaggcctttttcttctgtgagcatctcatcactgtccagcagcaggtggaaaaagggggacaacaaccagacctattttttctcccccattttttccaaattttgctgtgccaaatgtttaaaattttataaatatgaatctattgaaatttccttaatcaagagcttcttcgtgtaaagtttgcttttttagctatagaaaaagaaaacagtaaatatctcttaatggcatccagccttgctgagctcaccttttttcctgaagaatgggtaggagtgaaatatttaatgtaaacatttcaccaagtccctttaccctaattttgaagctgcattaaacccaactcactaacacagggaatgattgcaccctagtcctctgtgggccaagaaactttcagaagcattaaaaaaatagttgaagtatatcacttctcaccaagtgggtagagtcagttggctgtttgtcccttgttttttatttattccataattatgtttgtgctttttgttttgtaaacagtaatggaacgtacatttttattttgtttagaagacaactttgattcaatctttcaagaactgttccattcttggtttcttcttagggggataaaaagttaccagttaatttgttttgagatatttaagcattctttgagttatagaattgtgatgcagggatttgtgaatgagacatttacatgtgaaaggtgacttcactagttacctgcttgagcagagtaaagtgtgtatatgtacataaaatgtaagtaatcttaactccattgtgcagtgccttttagatgttccgctttctataaagtcttcaaatttttgcatatatattatatatatatgatgtaatgttatagaaatatatgtataatatacatattttttccaggggtatctgatagctctgtattttgttatggaagttgaaagaaaaaagtattttacctcagaaattaaataaaaaaatacttttaagtataaaaaaaaaaaatagcgccgctcgtgat

SEQ ID NO: 653 - protein, 61 aa, Human
LVLFGIFFFSFLKKMFSGNMNKHTANYSGAGKAQELATSQLHSWDGKPCCELLRLFTYFTY

SEQ ID NO: 654 - DNA, 4257 bp, Human
ccaactggatggtttttgattgaagcctagaacatctgtagagacaaactctacccagtcttttctagacctcaactatctccagtgttgttgtttaatcgtagccggatcagggagtgagtcttttaggcaaatgttggattatatatcaaaggaaaagcttagtttcagagaggaggaagggaaagagatgtgagggaagcatttcatcaaccagctacgtcccccttagaaggatcactgcagcaggtcaccgagcaggagtccctctgagcgtcccttctgtctcgttctgccctagctggcagcatatgaaccaggcatgatgcagcaggagcagtgaatctggagtcagccacttggcaccctggtttcgctgagaacaaactctgagatcttgggtgacttctcatcactctggacctccattcctgtgaagtgacaggtgtggaccctgagggtgcggtggtgagcacactgtctcctgctggcattcaccccactcatgctggaaaggaagatccagatcgtacaaaaatgagaaaaagaaagaataagaagggtctggtcccagttctgactcggccattcttacagctctttctggctttgagtttgcttgtggaatttcctgggcagttgtgttaaatccgccaggtcacgtgcagacaaagctgtggctgcgagagttggctggcctcttggaccagaagccatctccatatcctcatgagcgattccatatctccactcagaccctgtggactacagtgttccgctgtggtggctgccaagatgccttcttaaacttatgcaaggaaaccaaaccctcccacagttcccaagcagacactggaagcagaggcttctcacccttcctgctttttcaccacaatcaccttgagctcgtcccttggactagagtctccacagttccagtaaaattctgcggtgggctgatgagctgcttgcatttctgtgacatttccagatatgattctcagtgggattttggaaactttgattgctcaagctcacccttcttaacattctgtaatggttacagatgagaatggaaaacacatattttatggatgaggcgttttggtctcccctgcagtcgatttctagaatcaagttttagagttcggctgatgcatctgcctggggacctcagatgggaggagtgtgtcagttgtaccccgacagaaatgtctctgggatctgtggctggcttgccccgggcatctctcctttaagctcaagttttgaactctctgcggttttccacccctgccttctcagccacatgctttggccttaaacgctcagtcttgtggagttcaactctgtcaaacgattggaaagggcatccatttccagatctttggcattttccccgcgctgactctttgatgatccttcactgtggccttttcaagctcagctgttcctgtgtatttgagacgagggtgagggaatgtggtggccacaaaagaacagggacttgcagcacaaatgtcacttctgtctcccttttcaatggtagcacggaggaggaggtgctgcgttggagggaggggatcctccaggagctctctggagcccatctaggaagctagagtgtgtggcccgccaggagctcaggaaggatacagccactgtcgcaggggaaagtgtttgcttcccgtggagccaagcgcccaagactctccgtatccttcaccctgacagtttaacttcagcgtttctctgtgcagttgcggtcaccatgggtgagcactgtctgtgcacgtgccagggaggagatggctgggaccactgcacaggagggcgcagcctggcgtcgccatgaaagttgtctctgtgccatctctccggtccttgaggagagcccagaaagattttaggacccaggaggtgcttttcctccagctgttgccagtgtccttctgagcctggattctccggggatttccgtcgtggtggatggacttcacatcagcagcagttctggtacagaattgtaatgtgttttcatttctctgtaggattcacctctcaccagcgtctgtcttaaaggtagggccaatttcatggagcatttttctgtgtgtgtccttgttgcttttgccagaaaaagtggatttgacatgcgtgccccgatgccaccatagcccctaggccaacaatgtcatggtctaaacaccaaaaagtgatgccccgcattccttccctggatggtaccgtttcttctccgtctctctttgatgattctttgggaccaaagtcctctccttagtgcgcctacttcctgtgggcatcatgccacttggaacttattggaactggcccgggagactctgcagtctgcgccgtttgaaaaccctgagaaagagatgccacctcaacttgaatcatgacagcccatcgctcagtctcaccctaaactcatggagcttgtttcagctcctcacttcttgactgtatttgtactatgttgaaaaaatatcctgtccacaaagacataagcctaacaacctagaaaaacaacagggtactactggcattacagaacttctttgcctttcaaaacaaaagcaaaacacagtgaacttcaccacggagctgcacagcgtggggaactcatccatcactttcaaaattagagtcatttgatccaagttggagtcagacacagtatttgagctgcacggcttctgggttctcccaccttatttgatcatattcgaaagattatttcctgtgtttgctttgatttgttcctcagtacattaaaatgatccacaccttgaacactgccctctctagaaggttgattttgatcagccttttgaagatgggtgtcgtttccctaacttatctcacagaattttgagtgttgtatttggcaagttctgagatttgccttctgtcttatgccaaacacccctttctaagagctgtccccgcttagttttagaagtactaggggttttcatacttattttatagaacacccatttatatttatttctgtatatagaactaaaaaaaacagtagtgttaaaaatctttgttgtggtttgagcatctttgctgcttttggattgagatggcgaatcaaggcttcacttcctctctcttctgtctttagaaagctgtgatcgtgcgtgcaattatttgaaaggcaacatagtcaattaagaaacctgtagttgttaaggaagaaattgttggcaagatatccatactgcccatatctcgttggtgcaataattaaatagcaaaggaaatctgtattggcaactattataattcaataattcttttgtttactgcccttttctgttcaagaattttctggaaattactccctttcacatggttgaactcttaagttgaccagttctcatagctctatcactagaatggtttgcagataccccaaacatactatgataaaatcaaattgtgctacttttgacccatgtaatttacctaaaagttgtaattgctgacagagtactgccttgaattttggtttaaaacctctctagtttcaatgacaagtaacaactcaaataattccatattgtttgaggaagaggccataatccttctgaattgttggcactaagtaatgggatttggcccagtaagtatgacggtcgtgtcgcctaaccaacgcagagcagtgctttttgtgtggctgaagcgatgtgctgacgaaaaaaggaaaattctaggacaatcgttggctaaaaatcaccttaggatgaaaaatttgaggcaaatttttttaaatgacagaaaaagataatcatctcacttgcttgaaacaggagccagcatgatctctggaagcatcaactatccctcgtcgtgattgttgaaagctctttcactgttttgcattctagtttgaatagtttgtattgaaattggattcctatcttgtgtatgtttttggtgcgtaaaagggaaaaattggtgtcattacttttgaaatttgcaggacgaagggcatgcttttggtttgctgtaagattgtattctgtatatatgttttcatgtaaataaatgaaaatctatatcagagttatattttaatttttattctaaatgaaaaaaaccctttttacttcaaaaaaattgtaagccacattgttaataaagtaaaaataaattctgaaaaaaaatctatgtcgggtgcggagaaagaggtaatgaaatggcaggaattcgatatcagct

SEQ ID NO: 655 - protein, 9 aa, Human
MKWQEFDIS

SEQ ID NO: 656 - DNA, 1004 bp, Human
gccgaagccgccgtcctgctctcccgcgtgggcttctctaattccattgttttttttagattctctcgggcctagccgtccttggaacccgatattcgggctgggcggttccgcggcctgggcctaggggcttaacagtagcaacagatgcgtcggcggcggcagtagctgttagttgcagcagcaatctcttcccgaacacgagcaccacaggcgcccgaaggccggaacaggcgtttagagaaaatggcagacgatattgatattgaagcaatgcttgaggctccttacaagaaggtgagaaaaaacatgtcggtgaggtttatatatttcttaatttagcattattcacgaaactactgctgaaatgtaaactaacctccccggagccctcttgatttatcttatcagagatgcattacgtgtaacttacaaaagtaaatatatgctattgatgtaataatattgtgcagtagtttcacttcagcgtgatgaataaatgcccatctatctctctttgtagacttgcctaacgatatctcacctctactcccatgaattcacctttgattccagtgtgaactgtcaatcataaggtagtaattgagtgacttatcgctgtaccgtggtcccctaggtaaaatgactcaactaagaattaccacctccagtttggtatagcaaaaaggtgaatgtagtggtttgggaaaaagcaggggtccaagaataacaaagcatgaccagtctgtggcaagttaaatcttctaatagtcttataagaagaaatgggtgagattttaaaatttatgtatctatgtaagactggtgatagtaaatcttaaaacagtccagtggcaatctgctgctcagttaataattactaaaattcttggatccctgaatagaaattaaaaaaaaaaatacaagaggcagtagagtcaatacaagcttaatacaagcttagagtaaatacaagcttagagtcacttgatgactgttttact

SEQ ID NO: 657 - protein, 41 aa, Human
PKPPSCSPAWASLIPLFFLDSLGPSRPWNPIFGLGGSAAWA

SEQ ID NO: 658 - DNA, 6584 bp, Human
ggcggcgcagtgtgctgaagtttgccatgatttctctggaaatgtaataactgttctccaaaagtgaatgtggaaacaattttttaaacggacacgaggcttaaaatgaaattattttaaagtatgctctaattatatagatagatagggccaggtttcctaaaacattttccctaaactgttcatttgaggcttttatggtaagatctgagtatgacagttaggtaaatcttttatgtcctaaatctttatataaagagcagtttttaaattagtaacaataataaaagatatgaacttttttttctgtttctagtttcattcataaaatgaacacagcagaatttaagagtgcaacgtttccaaatgcaggaccaagacatctgttagatgatagcgtcatggagccccatgcgccatctcgaggccaagctgaaagttctactctttctagtggaatatcaataggtagcagcgatggttctgaactaagtgaagagacctcatggcctgcttttgaaaggaacagattataccattctctcggcccggtgacaagagtggcacgaaatggctatcgaagtcacatgaaggccagcagttctgcagaatcagaagatttggcagtacatttatatccaggagctgttactattcaaggtgttctcaggagaaaaactttgttaaaagaaggcaaaaagcctacagtagcatcttggacaaaatattgggcagctttgtgtgggacacagcttttttactatgctgccaaatctctaaaggctaccgaaagaaaacatttcaaatcaacatccaataagaacgtatctgtgataggatggatggtgatgatggctgatgaccctgaacatcctgatctcttcctgctgactgactctgagaaaggaaattcgtacaagtttcaagctggcaatagaatgaatgcaatgttatggtttaagcatttgagtgcagcctgccaaagtaacaaacaacaggttcctacaaacttgatgacttttgagtagaagcctgagaaaaaaagagaggtgaactgttgcttctacgtgagcatgaggacctgataaaagagcgccagctataaaccatcctgtgccaggaagagcccagaggctctgtctcagtcgttggagttctcaaccaaaaaagcactaatttcagggaatgatttgagatattcccagagaacaaattggagttgcaaaacaaactgccatgaaccatgcttcttatctcagaactgacctgtggaaaccactgccttaaaagaatgaaaggaaaaccaacatgaaacaccaaatagtgtgtgtgaatcttctggcggtgctgtgcttggaatagatcgtagctaatttgcatttcttttaactttgtaataattttagaggggggaattgccttttttagatatgctttaaaaaggaaaaacatactcttgtggattccatcaggagctggttttgaaccgaggtgaagagacttagcagggattgtaccagcagcccacctgcaaggtttgttctccctctagtagtctgcaacctcactggctttctcacagcaagagtgtaggaatgagaaatgttagtcatgtgagttcttgggtttgtttgggattgggtgggggtgtttgttttgttttggatgaggggagaatttttttaaacactaaacttctgaaatgtagtactgtaaggggaacattatttcctgcaggaggtacaaaggctgtgtgttcatttgccagacgctttttttttaaataggttccagaaaacatggttgtttctaactagggttaaagtttagctttctatatgaattcattgttggaccacagatctgcttaagtaaagagctataatcccaacctaaacttttctgagattttacaataattagatctttttccaagttaattgggttttcccttctcccagtcataggtggtttttatcatcaagacagactgatattttgtcaggatattttcttttacagtgtttgatgtgcataatgccagagttatttttttattattcattttctctctttttgttcaatatgagattcaggatcatatttgtttaaaaggtaacacatagagatgtatgtatatattttgttataagacatacaaaataattttaagagggataaaggtgaaaatatcagattctggaaattttaagtatctaaactttatacttgtatgatttaccataaacataccaaaacatttttctgaaaatttactgtcggtctctgacatgaaaccgtattttgtcagtagttgaccaagcagttttatgagaactcttctatgcaatgatgcatttaatttctaaagtaaatgttgaattattaaaaaaaaagtttgaaggtaagatgccttagaattttaatgaaaaatgacactcaaacaaaggctatatgtcgaatgttataaactcttgagacataatgaattttagcagtggcctagagtaaggtaatgctttgtgactgatatctactaatagacttctgttactttgggcctcacataaaatttctcacattcgtattcttagagaattttatacttttttattataagtattttgcccttgagtccatgaaacttcaatagaaaatattgcttatacaataattagcttaaaatccatccaaaggaaaagagaagagctttttttgagtgttaagttttttaatttagtattctgtttggaaaagatgttaagagttcaaatatgcttcttatgtaacagaaataccattatttctggggtttagtgacacaggctggagaggacaaaagtttcctgtcctgaatgatttttcaattaatgctctaagcttaacccatgttgggtaatagaaagacatagccagcagtattactacgtagaccttgcacatcttacttttgttttgcatttttaaaaatttcttaatttgtttatttctcttcagaaatagcgtttttaacagtgtatgtgctttttttaaaaagtattgtgaatgagaaccctgtggattttttttatttcatttgtttgtcataataagctaacgtagaaatgttgtaggttaaccatatctgtggaaatatgcagttggaagtcagagcctgacatcacatagttttgccaaagggagagagctaagctggaagatgtttttgatactttcggctctaaacattaatggatgtttgcgtagagtaagatagcgttcaaatttggttaatagtttatagatagacttgtggcctctgactgactaaatttcttaacagcacagaagtcgttgtttttctgtctttaaaatttattcattcagaaaattagtcattgctttttaagattattttagcatttgaagcaaattgaaaacagaaaagtgacttaaaatagtgtaggtgaattttttatctataatttaccaaataatacctgataataattcaaagaaaatatgttaccaaaatatattaaatatataggtagttcattcgtgggaagatgaatcttcttattaagcctgccctcaattgtaaataagtgactcaaaaactcaaaatgttcatcagcattcaggtcatttgtttcacccttagccaagaagaactcattagaaattcagttataatttcaatttaagcctgtttatgataagcataatgattggcatgttatatagcctgttgaaaataactacagaatgaccttccagagcactgtttttggcctcgtgcccgctctgttcaggctctgcttgtttttcagaatatgatttttacctccagacagtaagaattgaacaagaactgatcaaacacaccttcctattttgttttcttcactatgtaaatattatttgggcaaacattacaaaaagggatccaaacaatttgagtttcagtatttttttctccctaggcatgtgcttcaatttcaaatatttttttctgtgtggaaaatgccatgtaactattgcactaccttctgtgtggactgtgttggtattggttctttctgtatatcaaaagtcagggtgtttataactgcaaagtttgtataagtggctttattcctcttctagaagatttatgaggagcctaggaagcactattggtacaggaggaaaaaagaatggaaaacatgtttacagactctagctttccttattagcttaaactggggccctcaaagagcagcctgttgatcttttggccaaatgacttgagcataagtcttttatttctttttaaggttaaatcgtaaactgtatacctttactactgaaaacaaaactatagggcatcatactaattgaaaatcaatagtaatgggttccatccattagctttttaaatgaatagatctggtattgatttccttcctgtttttttgaggcacattcctttacaaccagtgtttaaaccaccacgtaatcatcttctgcaaacaaggggtgccagtgttgcctaacagaagataatctttaataaagcaaatcctctgcttcaaaggtttttgaaataattggatccctttttgaaaaggaagatgagtttaactgtgtccaggtggagtaatagtactgctgttgcatgaatagatgatacaaagcaagtgatgaggttggtatgacttctttagtgaccttttagggtttgcttttattttcctctcttttttgtattatttctttcaaacatagtaaatatatgattttacagccaaagtggtattctgttttttctaagctttgagatacaaatattgctatttaatcacattgatgatgaattactttccatgtgaaccttctcaaaatgatttaagtacctttgattttgctcccctaaaaatggcttgtgtctaaagtgacatttttttccctatttggagggttctaatgaaagagatccaggcataaaaactcttttgcttattgaaagcaatttgattacacctatgtttcaggttatagtggggagaaaatttggtcagtgccttattatttgaagagcaattttagggcatcaagtatgacaataatcatgtgccctcttgctcctcttatttcaggagtgtgtgctatccctctctccaccagcttaatctttctcaccccaagtctaacaaagtctttacagaaacctctgtaggtgattgttgcagtcttccttggtttttgagtctttttaaacaagctcctaccctgcttctatccttttagagtaggagattaaaaataaacccaccccagtcaacctttagataagcactcttaaaaacaaatttgaagagcactcttcagccaagttcatttttattttgttgttgatgttttgagcatacatttaattgtaaggccttttggaaaagccctaaaagaataagatacaaccagaaatatttgagttttgttaaatgtactgaaatcttgtaatgaaaatccctttggccagaaatgagatttatttccatttatttttacatttaagtaacactcaaaacaaacaagtagtcacttaacctgccagttattattttcttgaaaatatacaagaaagtaaaaatatctctaatatataagttaaaggaaagttaagagactaagctagttttttcagtgaaagcaaagttggaaatattttgcttctctcagattattggaagacctagagctactggatgttaacctgaatcaagatgttcttttcacatttttttaaagggctagtatgttccagagtaggcaagtagtcattcaagccaaatgaaagagttaactggtccttgaggagtgttagcaaaatttaaattttgaccctggccatttgtactacagaagtgattatgggattaaaagaatacataattacagtgttttgggattgggctcttttttttcttaatagaaaagcagaaacttcataaataatagctgtgctttagataccagataacaaatattgtttcccctgaagatatgacctactagaactactcacatatatagtccaataattactgacttaataggtatggtaaaatagctgataataagtcagactctcaagagtttctgtaccttgattattgacaaattcattgttttacatcctactaaagaacatgtgtgtggggagggggtggggaactggttcacaacataatctgaaggagatcaaacatctgtaaggacaggtacccagtgatgataatatatctgaaaacacaagccatttttattctttatcccaattaacttgaggtactctaatgatgaagcactcgattgcactatgacctccttgagtgatgtgcagcttggttcctctctcactttttgtttctttttaatatgcaaatgtgagtgtgcgatcttcagtgtgtctgcataagctaacttaagatgaatttaagtacagttttctgaaatatttctattgaaataaattacttaaaattatagattgggtgaggatgtttttgttactgtatttgcatttttatcatgaacttttaaggtgcaaataaacttta

SEQ ID NO: 659 - protein, 232 aa, Human [sequence omitted]

SEQ ID NO: 660 - DNA, 665 bp, Human
aaggtgtcataaacctctgagactgtagcctgcttcttagcttctcattgagattcctagaggtgcgttcgagttttcagagtaattttccagaccaaccagcgtcagtgggaaatctgacctcttttggcaaactgcgatcattcattttcctgagtcccctggtggggtggggggaattctgcctcaggaccctgaggggtctttggggcaagatggccttggtaatgcagccactaagaacaggacttcattcaaaggcataatgaagtaaccagggtgaccatcaagtaaaattaaagcacaagatcattgtaggaggcttccttgtcaaagacgtgaacgtgggatttccaacgcaccatggtgtgtccactcatcactgcatgttaggaactgctgtctctttgggacacgagttaaaagaacacactaatttctggagtgtgcctgcagcttcacggccttcattttgttactaagttattttctggaagaacagcaaaaatttcaggttgaaaacagaactttccaagtgctactgaaattccgcagagaattacgctgcgatggtgggtttcttaccctagaaacatcctaacctgtatccacagaagatgtccttttatttttttaaaagatcaataaaatcaagagaaacgaaa

SEQ ID NO: 661 - DNA, 1369 bp, Human
tatatcgcagtggaaggcgctgtgggttgaggtcgccgcccacctctcctaggggaactatggagctggcagctgaaagactcagtgaagcaacgaggatgccggggagagggaaggggctgggctctgggcggtgccaagtctgtgagggggcgcggtcaccgcccagggttcccacgaacgccaaggcggccacgtcctgctccccctggtgaagaagctgccctgggcttgtcgtcctagggtctccagacatgtctgaggtgaagagccggaagaagtcggggcccaagggagcccctgctgcggagcccgggaagcggagcgagggcgggaagacccccgtggcccggagcagcggaggcgggggctgggcagacccccgaacgtgcctgagcctgctgtcgctggggacgtgcctgggcctggcctgtggcagaaatctgaagctatcatggaacaattgaagtcttttcaaataattgctcatctaaagcgtctacaggaagaaattaatgaggtaaaaacttggtccaataggataactgaaaaacaggatatactgaacaacagtctgacgacgctttctcaagacattacaaaagtagaccaaagtacaacttccatggcaaaagatgttggtctcaagattacaagtgtaaaaacagatatacgacggatttcaggtttagtaactgatgtaatatcattgacagattctgtgcaagaactagaaaataaaatagagaaagtagaaaaaaatacagtaaaaaatataggtgatcttctttcaagcagtattgatcgaacagcaacgctccgaaagacagcatctgaaaattcacaaagaattaactctgttaagaagacgctaaccgaactaaagagtgacttcgacaaacatacagatagatttctaagcttagaaggtgacagagccaaagttctgaagacagtgacttttgcaaatgatctaaaaccaaaggtgtataatctaaagaaggacttttcccgtttagaaccattagtaaatgatttaacactacgcattgggagattggttaccgacttactacaaagagagaaagaaattgctttcttaagtgaaaaaatatctaatttaacaatagtccaagctgagattaaggatattaaagatgaaatagcacacatttcagatatgaattagtttgacattattgagattagactaaggtaatttttttaatgggacctctcatgagaagactggtaaatcaaaaataatgatattttggagcaaaagtcattttatatttaatcctattttgtacagtaaaaataaaactttaaaacaggttgattttccaaaataaatatgctaaaacct

SEQ ID NO: 662 - DNA, 3466 bp, Human
ttcatttcactgcactccaccctgggcaacaagagcggctgcagttggaggccgagggcagccctctgctcactgaatgtcttgcatgtgctgactgctgcccgcagtgctgaacatgccccaccgcccaggcccagcactgcttgttgggtcagcatctagtgctgctgtcacatctttgtctgcacagccagtaggattgcctcagccagggggtttatcagaaggtgtgcaaggcctttgggggaactgagcccctatagtgggcagtctcctttaccttcccacctccctgaaaagcacagaagacagtgccttggtttgtgttttgaagcaaacaagtcagctttctggctttgccccaaaactgtgatggaacataataaaactggagatacggtttttaacactgcaaaaaggaaaaagcatcaagtttctacttctggctggaaagcaaaaccaatctcagctgacaaggctgggcaaactaagttttcctgagcccattttcctttgagccctgacctagcctggccttacctcattaaggtttggttaaagcagtggaaaggaggaggaggcaggggtggatgggggtgtggggaggggatgagcactctgcagccgattaatctgttggtaggggcccagcttcttgggagtgcttattcagcccaagagtggaggctgtttacagcgagccctggagatggcagcttgtctccagctggggaggggtcaggcccctaaattgaagaccactttggtagcagaactgtagggactggtgagtcaactcacagattctgcagcagctgctccacccacaataaagcaaacgccgacaggctagaccccagattgcaggggctgccacctacaaggtgggaccacaggctgcctcaccgggattgtctgccactaaatagctggagtcacagattgagataaatgccaccttcaaggttgcagtgaaaagcataatcctatgtgatgaatttatatgtgttattttttaaaaagctattttattactgcatgttcccgtcccgtcttgtgaatgtgagtccccgccaccacgtgaggtgcagtcgttgcagcggctggtgcaggagtgcagctggcgcgtgtgtgatagcatctcgtaggtgttgctgcacaagagttaaccagagtcaatgccaaacacatagtatgagaagtgtactttttaagaaattaatttatttgagttcaaatatttttgaaatataaaaattggttgtattttttaaagctataattcttgtagacattctgtggttaaaaatttgattgtgcttattaaaaatggtcatctatgttttgcacttcagctacgtgaaaataaaatttctttgggaaggtgacatttggcttcctgattacgggagggagttggttatctcaggtggagcaggaaagcctgggttgattctcacaccaggatgggactggggacttcccaggatgggagggaggaggccatttctacaccatactttgagctactgacagcaaaaccctcccaccatactgggtgcatcttgtttactcttgactaacatacacttctgatttacagcagaagcctcagaagctaattcagttctcctttggcatgccactggataacaagatagtgagggggcagtgtgtacaagctgtggacatgggcatttcctctctgttgcagcaaggcggaggaaagcccagggagagtaaaacgctacaatctttctaacagctttgccctacaccaccatctaaatgattatgaccaagtggcgacatagtatcttattttcctagaattatgtccagctgtgagaaagccaggttcaaatttaaatcctttaataacctgtcccagaattactaacaatgagacttaaacaaattttgatttgtgaagaaaacatgaaaaaagtccaaaagaaaccccctcaaagggcccgagtgtcaacagttcccctttggagcagctcatccatctctcaagtgggggtcctccggcagccagcttcctctgtggcgccaggtgggtccagagtgggcccgctcctttagaagtcaggcaggccaggcagagggaagaaagaggcgaagctctcaacctcctcccggagagcctgcacggccgcctggtacttatcccctgccagtctctccttgaactctttcagggtggctctgacaccagtgtcgctctggatctgcagggtcagctctatccctctgtgaataaagtgggctactttttggaagtctttttccaaaagtccacgggacgtcagtgctggggtccccagccgcagtccactgggccgcagagcgcttctgtcacctggacaggtgttcttgttgcaggcaatagaacaggcttctagcaccttctcagcccttccaccatctgtgcctttggaacggagatccacaaggatcaaatggttgtcagaaccacctgtgactattttgtagcccagctccgtcagggcctcagacagagccctgcagttggccaccacctggtgttgataaactttaaattccagagtcatagcttgcttcagtgccacagcaaccccagcaatggcgtggttgtggggacctccctgcaggccagggaacacagcagaattgataagagactccaggttgtacagaatctctttgccagtcttgggatccacacttttcactcctttcctgtagaagatcatgccagctcggcagcctcgcagggtcttgtgagtggtggtggtcaccacatggcagtgttcaaatggggagggcaccacgccagccgccaccagcccgctgatgtgagccatgtccgccatgagatacgccccgttctcatctgcaatcttccgtagccgggcatattccaggtttcgggagtagcagctggttcctgcgatgatcagcttcgggtggaagaggcgtgcgttctcctccagctggtcatagttgatgtagccagtatctgggttcaccttgtagggcatagattcaaagaagatggacgtggcagagattttcttcttgtctgtcatgaacccatgggtcaggtggcccccatccggaaggtccaggcccatgatgcgcccatggggttccaccagggcagtgtacacagcaaagtttgcaggggagcctgaaacgagtggaccagaggagacatgattatttctaactgaggtaccaagtggcatccgggaccttggacactaagccttcacccaggagtggcgagaacaggccttgtaccttccctgagctccaggaggtgccccttcaccaccagccttgagaggtgaagttcagagagagggcactgcctgggagggggtatagagctgggagcccaagggtaatgcagagggatgcgtgacttatcttttatttatggcagtttttttgttttttttttcgagatggagtt

SEQ ID NO: 663 - DNA, 2599 bp, Human
gaaccactgacccaaatgaattctaaaccaatcaaatgtctgggaagccctccaagaaaaaaaatagaaaagcacttgaagaatattcccaatattcccggtcagcagtatcaaggctgacttgtgttcatgtggagtcattataaattctataaatcaattattccccttcggtcttaaaaatatatttcctcataaacatttgagttgggtcgaaaagatggagtttacaaagataccattcttgagtcatggatttctctgctcacagaagggtgtggcattggaaacgggaataaacaaaatggctgcaccaatgcactgagtgaaggaagagagacagaggatcaagggctttagacagcactccttcaatatgcaatcacagagaaagatgcgccttatccaagttaatatctctaaggtgagagccttcttagagtcagtttgtgcaaatttcacctactctgttcttttccatccatccccctgagtcagttggttgaagggagttattttttcaagtggaattcaaacaaagctcaaaccagaactgtaaatagtgatgcaggaattcttttctaaactgctttgccctttcctctcactgcctttatagccaatataaatgtctctttgcacaccttttgttgtggttttatattgtaacaccatttttctttgaaactattgtatttaaagtaaggtttcatattatgtcagcaagtaattaacttatgtttaaaaggtggccatatcatgtaccaaaagttgctgaagtttctcttctagctggtaaagtaggagtttgcatgacttcacactttttttgcgtagtttcttctgttgtatgatggcgtgagtgtgtgtcttgggtaccgctgtgtactactgtgtgcctagattccatgcactctcgttgtgtttgaagtaaatattggagaccggagggtaacaggttggcctgttgattacagctagtaatcgctgtgtcttgttccgccccctccctgacaccccagcttcccaggatgtggaaagcctggatctcagctccttgccccatatcccttctgtaatttgtacctaaagagtgtgattatcctaattcaagagtcactaaaactcatcacattatcattgcatatcagcaaagggtaaagtcctagcaccaattgcttcacataccagcatgttccatttccaatttagaattagccacataataaaatcttagaatcttccttgagaaagagctgcctgagatgtagttttgttatatggttccccaccgaccatttttgtgcttttttcttgttttgttttgttttgactgcactgtgagttttgtagtgtcctcttcttgccaaaacaaacgcgagatgaactggacttatgtagacaaatcgtgatgccagtgtatccttcctttcttcagttccagcaataatgaatggtcaacttttttaaaatctagatctctctcattcatttcaatgtatttttactttaagatgaaccaaaattattagacttatttaagatgtacaggcatcagaaaaaagaagcacataatgcttttggtgcgatggcactcactgtgaacatgtgtaaccacatattaatatgcaatattgtttccaatactttctaatacagttttttataatgttgtgtgtggtgattgttcaggtcgaatctgttgtatccagtacagctttaggtcttcagctgcccttctggcgagtacatgcacaggattgtaaatgagaaatgcagtcatatttccagtctgcctctatgatgatgttaaattattgctgtttagctgtgaacaagggatgtaccactggaggaatagagtatccttttgtacacattttgaaatgcttcttctgtagtgatagaacaaataaatgcaacgaatactctgtctgccctatcccgtgaagtccacactggcgtaagagaaggcccagcagagcaggaatctgcctagactttctcccaatgagatcccaatatgagagggagaagagatgggcctcaggacagctgcaataccacttgggaacacatgtggtgtcttgatgtggccagcgcagcagttcagcacaacgtacctcccatctacaacagtgctggacgtgggaattctaagtcccagtcttgagggtgggtggagatggagggcaacaagagatacatttccagttctccactgcagcatgcttcagtcattctgtgagtggccgggcccagggccctcacaatttcactaccttgtcttttacatagtcataagaattatcctcaacatagccttttgacgctgtaaatcttgagtattcatttacccttttctgatctcctggaaacagctgcctgcctgcattgcacttctcttcccgaggagtggggtaaatttaaaagtcaagttatagtttggatgttagtatagaattttgaaattgggaattaaaaatcaggactggggactgggagaccaaaaatttctgatcccatttctgatggatgtgtcacaccttttctgtcaaaataaaatgtcttggaggttatgactccttggtgaaaaaaa

SEQ ID NO: 664 - protein, 39 aa, Human
EPLTQMNSKPIKCLGSPPRKKIEKHLKNIPNIPGQQYQG

SEQ ID NO: 665 - DNA, 4379 bp, Human
gactcctccagggacttggtccctaggtccccagatggggagactgaggccgtggctgtgtgtccctctgagagttggagcggggctgggcccgaattcgaccccagcaggattctctctcatttctgagccccggaggtggcagagcggcagactcgggcaagtgaaccctagggctgcaggagcccaggccccgacgccggcgcagaggggacggaagggcccgcccccagcccagcgtgcacagaggccatagccaaggccttaaggctcatccaaccggggactcatatcccccccaccggcagcccggcgccccagcctctacccgtgcccgccgagatgctgctgccgtggtcggtgtcatcggagcgggcccctggggtgccggagccggaggagctgtgggaggcagagatggagcggctgcgcggctctgggacgcccgtgcgcgggctgccctatgccatgatggacaagcgcctcatctggcagctgcgggagcccgcgggggtgcagaccttgcgctggcagcggtggcagcgccggcggcagacggtggaaaggcgcctgcgggaggcagcgcagcggctggcccggggccttgggctctgggagggggcgctctacgagatcgggggcctcttcggcacaggaattcggtcctacttcaccttcctccgcttcctgctgctactcaacctgctgagcctgctgctcaccgcaagcttcgtgctgctgcccctggtctggctccgcccccctgacccaggccccaccctgaacttgaccctccagtgccctggtagccgccagtccccgcctggcgttttgaggttccacaatcaactttggcatgttttgactggcagggccttcaccaacacctatctcttctacggtgcgtaccgagtggggccggagagcagctccgtgtacagcatccgcctggcctacctcctcagcccgctggcctgcctgctcctctgcttctgtgggactctgcggcggatggtgaaggggctgccgcagaagactctgctgggtcagggctatcaggcgcctctcagcgccaaggtcttctcctcatgggacttctgcatccgggtgcaggaagcagccaccatcaagaagcatgagatcagcaacgagttcaaggtggagctggaggagggccgtcgcttccagctgatgcagcagcagacccgggcccagacggcctgccgcctgctctcctacctgcgggtcaacgtactcatcgggctcctggtggttggggccatcagcgccatcttctgggctaccaagtactcacaggacaacaaggaggagtccctgtttctgctgctccagtacctgccccctggggtcatcgccctggtcaacttcctgggtcccctgctgttcacatttctggtccagctggagaactaccctcccaacacggaagtcaacctcactctgatctggtgcgtggtgctgaagctggccagcttggggatgttctccgtctccctgggtcagaccatactgtgcattggcagagacaagagcagctgtgagtcctacggctacaacgtttgtgactatcagtgctgggagaactccgtgggggaggagctgtacaagctgagtatcttcaacttcctcctcaccgtggccttcgccttcctggtcaccctgcctcggaggctgctggtggaccggttctcaggccggttctgggcctggctggaacgggaggagttcctggtccccaagaatgtgctggacatcgtggcggggcagacggtcacctggatgggcctcttctactgccccctgctgcccctgctgaatagcgtcttcctcttcctcaccttctacatcaagaagtacaccctcctgaagaactccagggcatcttcgcggcccttccgtgcctccagctccaccttcttcttccagctagtgctcctcctgggcctgcttctggctgcagtgcccctgggctatgtggtcagcagcatccactcctcctgggactgcggcctcttcaccaactactcagcaccctggcaagtggtcccggagctggtggcccttgggctcccgcccattggccagcgtgccctccactacctgggctcccacgccttcagcttccccctcctcatcatgctcagccttgtcctgacggtgtgcgtctcccagacccaggccaatgccagggccatccacaggctccggaagcagctggtgtggcaggttcaggagaagtggcacctggtggaggacctgtcgcgactgctgccggagccaggcccgagcgactctccgggccccaagtaccctgcctcccaagcttcgcgcccgcagtccttctgccccggatgcccatgccctggctccccgggccaccaggccccgcggccgggcccctccgtcgtggatgccgcgggactgcgttccccttgccctggacagcacggtgccccggcctccgcccgcagattccgcttccccagcggcgcggagctgtaaccccgacccctgcctccccgaagcctccctggggccccttcaggcctccttactccatcttccagacccctggcgaccaccgcccctctcagtggctccagggcctccctcagaggtccccaaagatggacacacaaccccaggggcagcaggaaaaacatatgggaattttctttctatattttaatctcatccctttaaaatgtctattttttattgtgttttttataatatacataatctattagtatagtatctcttgaatgcgattttttctagaatgtgttctgctgatttgttttagagccatgagtgcaatttatacacatacatctattgggaatgctcagaagttgtttactgatggaagtgccttcagaagagtccgggaaccacttcctaaggaaggaaagagctggccacagttagagcaagcctgcctggggccctgctctgtgttccagctgcaaactgcctgcatcatcccttcctgttactcttccttcacctgagacagtcgaggccacagcgtcagccagggccagagctgggatttgaacccaggcactcgggctccagagccacactgccccagtgtggggcttagtggcggctcctggccctgactgaggggctgactgaagcctggtgagagcgtgctgggtcagcctctccctggcgggaatcctctccgtccagtcttctaacctagcagcctcacgtccacagagctgccttgtgaaactcagcagagccctggcttcctgcagagccgtgttctcccagcctgcttcatggctccctggttgagccaagcttgcggatccgtggggtgaaggtacccgcaccgcctgggccttagtggtatgtacgggcctgcatcgtgagcagcgggcgggggcccaggcaggtgaggcagctggccacaagggcagggcccggcccccctcccaaggctgtgtctcatattcttgagcctgttcgagtttccttttccaagcctcctgttctcccacccccacccctgccatgctgcagtgactaaatctgtggttctcatccttggagaacacctgagtagctgctacaagctggccacagcccagcgactctgatgtggttgggctgggtgtggccagcagccagggcatcgggacttttcgaagctcccaggtgactcaccggcagctggggatgagaactgtcaggagggaaggtcagaagtcccaggatgcacttgaaaagcctctagctccaccagtgaccagctcctggctggactcctggtctggactcagcatcagggaggctctggcctctcgccctcagggctgggggcttcttcacatggtcatcaaagacttggccagttccgcctctcccgcggccgtccttgtctcacccagcatcacgacgcatcagttcaccaacaaacacgattcagtgctgctagtgctgggtcctgttctgggggctggtgatgaggccaagagggaaagagggagctctgtgttccatcgagggggcgacaagcctggaccagatgaaagtgactcatgttgttaattagcggcttagggccaaaggtggcccctggaccagtggcctcagcatcacctgggaaaaggttagaaatgaacattcccaggccccacctcagcctcctgaatcagagcatccctttggcaaaccatactgagaaacaaccacgtgcatcaccaagcgctgtgaagaaggcaagctttgagaccttgaaggaatcatcaaactctgggcctcggtgtgctcacccagggcgagacaaagacgccatgctcctccaagtggcctccaagattaaatgagcaatgactttt

SEQ ID NO: 666 - DNA, 909 bp, Human
atggcaaataagcacatgaaaagatgcccaaagtcgtaagtcattagggaaatataaatttaaaccataatgagataccactgcatactccctagaatggctgtaatgaataggattagtcacatggtgacaagaatggaggatcatctggaactctcatacactgacgataggaatgtgaaatggatcaactactttggaagacaattgggcagtttctttcaaagtaaatgtgaagatgccatacgattcatccattccatttctaattattcaagagaaatgaaactgtatatccacaaaaaagacttgtacacaaacattcacagcagctattatttattggtaatagctaaaaactgtaaacagctcccatatccatcaagtgtatggataaaacaaatttggtgtatttatacaatgggatactactcggcaataaaaagaacagttgatactctcaacaacctagatggacctcaaaataattcggtttaatgaatgaagccaaacttaagaagagtacattgtatgtacttggagaactaacttcttgcaatagatttttaagcactattaggagcatatgacttaaacagtttttaaaagtcagggagtaagtatgcttaaataaaatacaatctgtgaaacaaatctctgaattattatcacttcactggacacactaacttgaccatatttctgactttaatgtaactcactcttattccgtagtcacatgtttgcttgctcattggttcacattacatttattcagcatctgcttgagccaaggcactgtaactacatgttttttttagttacctacttttgtaaggtcctgtttctttggctacatctgattacagtaaacataggaagtttaataaaacaattttcatgaccgag

SEQ ID NO: 667 - DNA, 2253 bp, Human
ctcaaaaacagtcattcctatgaattgaggtgtacaaagtttgaatttgtatcaaagatgtaattattatttttaaaaccttttcactatactgctgctgtaattactttgatttttaaaatgtagattaattttttttttttggcttcaggtgtgtatccaccaagaatttcaaatttatgtggatttattttattggtacataatctgtaaacttcttaaggcattaacatgaaaagtttttttctttttattttatattgtggctcaggttatattttgaagatgttttgagtttatcctccaataggcaatgaagttgacaaggttttatgaaggaataaccaagtccctggagtcctgtggctgttgccacagtaatgcgtcctgctgtaaacaggacaggtgtgtcctgttgagaatgtgagcgggctcttccagcctcctggtccctcctgactctgccacgcccctcacctcactggcacttcgataactgactggacgtgttaatgggtcttttagggttctaaagggtgaaccacacttttaaagccccggctgtggttcggagggttagtgctgtatgccttttatttccctttccctttgaggtactgaaaggatgaaaaggtggtgtcatgttttggggagaatcttacttctcaaatggaaattgcactttttgctgaatcctttgcatttttttggtagtaagcagttcattgagtatcaggtcctcaaaggaatgagttggcccggctagggtgggccctcttgacctaacttcagagggggccttggctcagtaggtgtgaatcagggaagccacattgtcctcagggtgctgtatgaagctgggtgtgggcggattcctcccacaccttcacactggcctgcctccaactcatacagatctcggagcggtcggtacttcattcataggtccctgttcaggcagcagttctgtgggctgtggccctctcccctccaatatgtccgaaaccattgtgatgggtggcaaatcccagggagctcctaagccctgctctgcccacatcactgccacagagaagtcagaggaagggacttgttgctaaaaaatcctttaaaaggttaaatactttaaaagattaaagcaacataactgtaaacatatcgtataaaaatgaaaaacacaggaaccctcttcccttccgcctggtgtgggcttgggaaatgggcaagcggccccagcaatcatgggaggaactcttgcgggggagcggtctgggattccaaatgggcaggtcacacgaaggtcacgatgcttctctgcatcctgaaaagggctggggacagggccagtgggggtggtaagggtatttatagcacagtgcttgaaaagggaagattaatgtgtaaatataaaggacacacaggctgggggttggtcagaggcaagaggagggtgcctctgagcttcaacccctcccaggaacaatgagctcaaattggaagagtccagtggaatcggggggatggtgtgagcgcccctgttcagtctttgacaattgcatacagaaaagcagctggtatgggtttgggtgtcaatgaaagggccaaagactggtggccagctggtttgggggatttgggccattgatagcatctcccaggaacaacgactttttgcctccaaagttggatctagtgatgatcagcaccagcaggaaatgacatttggtgtctgcccactgcagccatactgtgacctccagccagacttccgcctaattgactccactggatttgtgctctgttgagtcagaggctcccgggggttggggatcgaggggcgggggtcagctatgcagcccatcacgtgtgtttttcatctgggatgaaaaagcctggttctcttttgaaatgcttgattgtacttattgagctaaacaagtcttggtgactgttgttgatttgcctcaaaagttttaagtcctgggttttcagactactgtgtagcagctgtgtgtttaacatactgtagctttttctcccttgggggcacatacaaataggatgtgttgatgtggactctaaactgtaattttcctgtaactattttggaatgatgcatatttctaatgtttgttatacttgtacagagtattgctgttggttgctttttttttttttaaggaaaaaatggcctgaaaacatttttttaaagacttacaaataccaaatataaaaaaatgtcaatgcaaaaaa

SEQ ID NO: 668 - protein, 105 aa, Human [sequence omitted]

SEQ ID NO: 669 - DNA, 486 bp, Human
  unsure 26: unknown base
  unsure 27: unknown base
  unsure 28: unknown base
  unsure 49: unknown base
  unsure 56: unknown base
  unsure 93: unknown base
  unsure 104: unknown base
  unsure 107: unknown base
  unsure 108: unknown base
  unsure 114: unknown base
  unsure 128: unknown base
tagtgttaagatgctgcagttgtgtnnntgtgaagaaaagattcgcttncactttnagcaggctatataaatatatatacatatatatatatnattttcacttnggnnaaaaanaaagttgaaaaatntgaggagaacataattaccttcacaaattatttatagatacactgggtgagaagcttactgtagggcagtcacccaaaaaaaactaattttagtgctttcaatagtgtaatatttgtatctattaccatggcagcagtgtctgctgcacactgtgtcctattactgtaaatctcctggtttataattcttatggaaactaatttgttttgtaatggaatccagagcagatatgtataatatgatcaggattgtcctacagttgtaaataagaataggtcctgtttattttgacatctttttacaaatgcattgtattagggtgtgaatattctgaaccatcctcttgtttaaagtttg

SEQ ID NO: 670 - DNA, 900 bp, Human
ccacgcgtccgccatgaacacattgcttctcggccttttggctaagatcaagtgtagaaatccatgaacactaaaggacttcattgattttttcagagagtagaaaacaacttagtttttcttttttcctgaatgcgtcataggcttgtgagtgatttttgtccattcaattgtgccttctttgtattatgataagatgggggtacttaaggagatcacaagttgtgtgaggattgcattaacaaacctatgagccttcaatggggaagaccagaagggtgaggggccctgaaagttcatatggtgggtatgtcccgcagcagagtgaggagatgaagcttacgtgtcctgacgttttgttgcttatactgtgatatctcatcctagctaagctctataatgcccaagaccccaaacagtacttttactttgtttgtacaaaaacaaagacatatagccaatacaaatcaaatgccggaggtgtttgatgccatatttgcaaattgccatctattgaaattctcgtcacactacatagacataattgttatctccttttggcttatgtgattttctgtttacaagtagaatagccaattatttaaatgtttagttgccacagtgaaccaggagtcactgagccaatgactttaccagctgctgactaatcttcatcaccactgtagattttgctgcatgtgcaggtcctctatttttaattgctgttttcgttgctgcagtactttacaaacttctagttcgttgagacttagtgaccatttggcatcaagttaacatcacacaataggaaacaccacttccacaagtctcaagcctcagtgctaaagtactactgaaaaggaactaggaagtttggccaattaaaaaaaaaaaaaaaaa

SEQ ID NO: 671 - DNA, 459 bp, Human
  unsure 27: unknown base
  unsure 28: unknown base
  unsure 30: unknown base
  unsure 31: unknown base
  unsure 32: unknown base
  unsure 34: unknown base
  unsure 35: unknown base
  unsure 36: unknown base
  unsure 37: unknown base
  unsure 38: unknown base
  unsure 39: unknown base
  unsure 40: unknown base
  unsure 41: unknown base
  unsure 42: unknown base
  unsure 43: unknown base
gaaatatttctagcagtgtcagtgagnncnnntnnnnnnnnnnttttaaagtataaatctggtaacatactgttcttgtagttttttgttagttttgtttttcaggttaattacccaaagcctcatccatcctcaaggtttttaaattttatttttttaaaataaattgtgcattgtatttgtgaatttttaaaatattactgttttatttaaatgccatgctgagcaattgttctctgtacatggtaaccaaaacttagagatttcgatcaattttgatcaatgtttagtaaaccaaaacatgtactgtgtacaacggaaataatatggcatattagccaggcatgatggttgcccaagacagttaaattaagctcaattctgtattttattagggctctgttatgtccttcatctgaaatgtacacatttttggtgtatgcttggtactggagattc

SEQ ID NO: 672 - DNA, 2896 bp, Human
gttccaagggctgatgctgggaaccttgctctggatgcgaggcctgcccctggagggagccgcggaggactggcagctgcagatgctggagcaggccagcctgtggctgggccgtagcttcctgctggcaggcttcctggtatcgagcagctgccccagcctggagcaggcggccaagggtgagggctgttcccccatcccttgtttcgcccactgcctcgactccctggtgagaaactttctgtgtcaccctcacagtgtccagatcatcctgggcactgccagggccacctgcagccatttctaaggctctgtggaggcccagggactcctcacccagctccagcgccagcgcagcctcctagcccaccagccctttgaggagctcttggaccactgggtctcggcctaccacctgctggagtggctggtggagcagcagcagccccttcaagagtacaagggcaggcaccagctggggaaggctggtgttgccttgtcggccacattctggagcccggcagacagcctcagcaagctcctgtagcccttccagatggtggtccgcgaggcgagtgcggcacaggcctctctgagccaggtgctgccccagctgcgctacctgcacatcttcctggagcaggttcacacacactttcaggagcagagtgtcggggagaggggcgcagccatccagctggctgaggggttggcccggcagctctgcaccgactgtcagctcaacaagctcttctaccgcgaggagtttgtgctggccaccttgctggacccttgcttcaaggggaagattgaggccatcctgccatgggggccgaccgacattgaccactggaagcaagtcctcgtgtacaaggtgaaggagattagagtgtctgaatactctttgaactccccaagtcccctgcaaagccccaggggtctgtgcgtggaccccaccagggtagccaagagctccggggtggaggggagaagccagggggagcctctgcagagcagcagccactctggggccttcctgctggcccagagggagaagggcttgctggagagcatggggctgctggcctctgagagaagcgggggctcgctgtccaccaagagccactgggccagcatcattgtcaagaagtatctgtgggagaatgagaccgttggagcccaggatgaccccctggcttactgggagaagaagcgagaagcctggccaccatctatctgtcttaccccccacaggagccttctctgaaagcatctttgcctccctgaacagccccacccttgtagagcaaaactcttctctcaaggtggaagccattgagcatctcctcttcttgaaggccaacctggagcagttccccaactacaccccgcctcccctcatctgctctagtggtgacctggccaaggggatacagaccctgcagtccgctcagggtgggatggcagacatggcaggtgccggtgctcaccctgcccgtgaactcctagagagcccctgcctgtaataggtcaaagcagagagctgggtgttgcatcctgggcgccacatgctcatggccagaatcttaaacctatttggtaggaaagggtcagtttctcacttgacagattgccatatttttttttctgggagatgtcattttccatctcccgattacttcctttacgtctagcagtatgtgccgagaagaggcttactctcttcgtaggtgactgtgaattttgtactacgtggctttgtacatgtgatgctctgttaaaacataagtgggtatgaaggtccttgcatacaccttgtctgtgtggataagtggacacatgcccttaagaggcttgctttctcaaaaagtggccaaggatgtggagtgggcatgtgctggcaggtgggatatgtcctcagcctttgggggcctggataagctattgcagcactttctgaggctttcactgtagggagaaggaaaccccaagggtagaatagccatttccagagggaagtacacacatacccccacacaccagtctttttgggggtttcagagtggccggagaaaccgactgaagggactgaccagctagctaggagagctgagacgccagtcctcaaatggcgttcttaccaatagtctatttccagactactggaaacgttggggtttcttcctccagtgacagcagcctcagtagctttcctgggctccaggcggctggctgcacaccctgcctgccatcacccttgcccctgcttgtcctggaccacttttaaaggggaagtcccttatttggaagagagaaaggatgtgtgtagcacacactcatcatggattgctcagagttcctttagggcagagctgagggcctgggatccaggaaccagtgggattggatgggagaagaaggaagggggtggcccgtcacccccgcaagacttgcatccaggtagcctaaggactcctggtcactgggtagggtggctgctgagatgcaggtcggaagaggcaggggaaggctccaggcctaacttggagcatgtcactggccatgggggtgaggggacagactctgctctcactggctggcagccccaggagcctgttcccttgcctctcctggatgggttgtcagccctgtgtttcactgtgaccaattcattataacatttggatattactgaaaatgtaaggaagcaggaaaaattaactactttcattcagagatagcctctatcaatagtttgacatttttccctcttttacattgagatcataccctaggtactgtttagtatgcaatattttcattttcgcagtataataattgcacctgttaaataaagttttgtaaacatttaaaaaaaaaaaaaaaaaaaaaaaaa

SEQ ID NO: 673 - DNA, 365 bp, Human
  unsure 55: unknown base
  unsure 56: unknown base
  unsure 57: unknown base
  unsure 59: unknown base
  unsure 60: unknown base
  unsure 61: unknown base
  unsure 62: unknown base
  unsure 63: unknown base
  unsure 64: unknown base
  unsure 65: unknown base
  unsure 66: unknown base
  unsure 67: unknown base
  unsure 68: unknown base
  unsure 69: unknown base
  unsure 70: unknown base
  unsure 72: unknown base
  unsure 73: unknown base
  unsure 74: unknown base
  unsure 76: unknown base
ttgatttctgtgtcacctactgtcatttgttaaaccgctggcctacagcacatgnnngnnnnnnnnnnnngnnngnggagagtttacataaggaagagaagaaattgagtggcatattgtaaatatcagatctataattgtaaatataaaacctgcctcagttagaatgaatggaaagcagatctacaatttgctaatataggaatatcaggttgactatatagccatacttgaaaatgcttctgagtggtgtcaactttacttgaatgaatttttcatcttgattgacgcacagtgatgtacagttcacttctgaagctagtggttaacttgtgtaggaaacttttgcagtttgacactaagat

SEQ ID NO: 674 - DNA, 4359 bp, Human
gctgcggctcgccgcgcggctccagctggggcgcggtggtcccgacggtcacccgaatcgcagggagtcgccgctggagaggggctcggcgcccggcggggactgcaggcgatgacccaggatgcagccaggggccacgacatgcacggaggaccgcatccagcatgccctggaacgctgcctgcatggactcagcctcagccgccgctccacctcctggtcagctgggctgtgtctgaactgctggagcctgcaggagctggtcagcagggacccgggccacttccttatcctccttgagcagatcctgcagaagacccgagaggtccaggagaagggcacctacgacctgctcaccccgctggccctgctcttctattccactgttctttgtacaccacacttcccaccagactcggatctccttctgaaggcagccagcacctaccaccggttcctgacctggcctgttccttactgcagcatctgccaggagctgctcaccttcattgatgctgaactcaaggccccagggatctcctaccagagactggtgagggctgagcagggcctgcccatcaggagtcaccgcagctccaccgtgccaagaccctggcagagcttgaggacatcttcacggagaccgcagaggcacaggagctggcatctggcatcggggatgctgcagaggcccggcggtggctcaggaccaagctgcaggcggtgggagaaaaagctggcttccctggggtgttagacactgcaaaaccagggaagctccataccatccccatccctgtcgccaggtgctacacctacagctggagccaggacagctttgacatcctgcaggaaatcctgctcaaggaacaggagctgctccagccagggatcctgggagatgatgaagaggaggaagaggaggaggaggaggtggaggaggacttggaaactgatgggcactgtgccgagagagattccctgctctccaccagctctttggcgtcccatgactccaccctgtcccttgcatcctcccaggcctcagggccggccctctcgcgccatctgctgacttcctttgtctcaggcctctctgatggcatggacagcggctacgtggaggacagcgaggagagctcctccgagtggccttggaggcgtggcagccaggaacgccgaggccaccgcaggcctgggcagaagttcatcaggatctataaactcttcaagagcaccagccagctggtactgcggagggactctcggagcctggagggcagctcggacacggccctgcccctgaggcgggcagggagcctctgcagccccctggacgaaccagtatcacccccttcccgggcccagcgctcccgctccctgccccagcccaaactcggtacccagctgcccagctggcttctggcccctgcttcacgcccccagcgccgccgccccttcctgagtggagatgaggatcccaaggcttccacgctacgtgttgtggtctttggctccgatcggatttcagggaaggtggctcgggcgtacagcaaccttcggcggctggagaacaatcgcccactcctcacacggttcttcaaacttcagttcttctacgtgcctgtgaagcgaagtcatgggaccagccctggtgcctgtccaccccctcggagccagacgccctcacccccgacagactcccctaggcacgccagccctggagagctgggcaccaccccatgggaggagagcaccaatgacatctcccactacctcggcatgctggacccctggtatgagcgcaatgtactgggcctcatgcacctgccccctgaagtcctgtgccagcagtccctgaaggctgaagcccaggccctggagggctccccaacccagctgcccatcctggctgacatgctactctactactgccgctttgccgccagaccggtgctgctgcaagtctatcagaccgagctgaccttcatcactggggagaagacgacagagatcttcatccactccttggagctgggtcactccgctgccacacgtgccatcaaggcgtcaggtcctggcagcaagcggctgggcatcgatggcgaccgggaggctgttcctctaacactacagattatttacagcaagggggccatcagtggacgaagtcgctggagcaacctggagaaggtctgtacctccgtgaacctcaacaaggcctgccggaagcaggaggagctggattccagcatggaggccctgacgctaaacctgacagaagtggtgaaaaggcagaactccaaatccaagaagggctttaaccagattagcacatcgcagatcaaagtggacaaggtgcagatcatcggctccaacagctgcccctttgctgtgtgcctggaccaggatgagagaaagatcctgcagagtgtagtcagatgtgaggtctcaccgtgctacaagccagagaagagcgacctctcctcaccaccccagacgcctcctgacctgccggcccaggccgcacctgatctctgctcccttctctgcctgcccatcatgactttcagtggagctctgccctagtgtgggcccagcgccagactggacagaagccctggggcaacctcctcggccacccctccaggacagtccctctctgtggagaactgaatggccctgtgcagagccatagtcccactgtgggtcctgcaatgagcaggggctgggagtagagggtttctggggcctcagggttctgggaaagcaacagctatcagagagagaagggccagaccccatagcctcttagattcctggcagtagaaggagaaggatgggtaaattgacctctgaagtccctgaccattagcatggtctaggatcctttctagaaggaagatctgaggctctggtgctcagggggatggcttgggccttttctctcaaccttggctgagcctaccccttactttgccaaagacttgaggaccctgtatgtctggagttcagtcccctcctctgtggggctcaggtgattgaaatgtggatgaaacatttctctacttcaagaccacctctccctgcaaacaccacacacacatggcatgcatgtacgcacatgcgcacacacacacgcacacacctcaataatttctctcaagtttcctgagtctccagaaaaacagcactaacgctggacctgtctactctcagaacccggcacagattctctcttgatctccttttggaatctgagattcttagaagacaggatagggttaaatttagtagcagctcagttctagctaaatcactagaggaagttaattaactttaagccttcatttctccagcactaaaatggagtggagagttggggtggaaataagacatccttaaaaggttaaattgtctgcaaagcacctagcccagtgccgagctcccagtaggtgttcagtaaagcttagtgcctgactttctgaacactgattcctcctgtttggagtcactgggatactctcattgccgttgggatgttcctcactccttcccagttcgtggctgaggcagaacccagactgaagagggaagagacattccagaggaggattgccttcgtcagggtaaggggtgggctgctcaggggccctacccttcacccccttctgtatcagattggccctcccactcccatctcactctgcgtgtacaatcttccatatccgcaagttcactggcactcttctggcacctgggcaagatcccagaacagaggatggagtgactggcctcacagagcttagtgcccgactcaggggaaatgggactggtgcatgggaaatggtcagcctaggataggacacgagagtctgaaattcaaagcaaccagcttgaagtggtttgagaagctggaagcaaacatgggctagagagatagggcagaagtcaagacgaggatctggactgatgtggagaaagtagccacggaagcatgaactgtatcctgcacaaagtccctcttccccgcctcctaattcattatgcccaaaaggccttacgtgaaattccagcccagagtactcatgacttgagagacgtggacagagccagcttctaccttgcctggccgtctctcccctgtcttaatgtctgctcttgctctaagctccagaagagtggcgggccatgtatcttcaatatgtttttgctgtatgggcaggttgtcttattatgtgatcaacagatgtccaggaactaatgagtggaatttaatattattgtcaaataaaacttgatttgtcctataaaaaaaaaaaaaaaaaaaaaaaaaaaaaaaaaaaaaaaaaaaaaaaa

SEQ ID NO: 675 - protein, 494 aa, Human
MDSGYVEDSEESSSEWPWRRGSQERRGHRRPGQKFIRIYKLFKSTSQLVLRRDSRSLEGSSDTALPLRRAGSLCSPLDEPVSPPSRAQRSRSLPQPKLGTQLPSWLLAPASRPQRRRPFLSGDEDPKASTLRVVVFGSDRISGKVARAYSNLRRLENNRPLLTRFFKLQFFYVPVKRSHGTSPGACPPPRSQTPSPPTDSPRHASPGELGTTPWEESTNDISHYLGMLDPWYERNVLGLMHLPPEVLCQQSLKAEAQALEGSPTQLPILADMLLYYCRFAARPVLLQVYQTELTFITGEKTTEIFIHSLELGHSAATRAIKASGPGSKRLGIDGDREAVPLTLQIIYSKGAISGRSRWSNLEKVCTSVNLNKACRKQEELDSSMEALTLNLTEVVKRQNSKSKKGFNQISTSQIKVDKVQIIGSNSCPFAVCLDQDERKILQSVVRCEVSPCYKPEKSDLSSPPQTPPDLPAQAAPDLCSLLCLPIMTFSGALP

SEQ ID NO: 676 - DNA, 2909 bp, Human
ggcacgaggccgggagtcggtgaggcggctgcaggtccctccctgcggagccgctggtccggctggcggagatgtgaccgcgggcccggccggcctgcctcaggcgtcgcgtcagctcccgtgtccgtgcccttaacccacaccgatggcgggatccggctgcgcctggggcgcggagccgccgcgttttctggaggccttcgggcggctgtggcaggtacagagccgtctgggtagcggctcctccgcctcggtgtatcgggttcgctgctgcggcaaccctggctcgccccccggcgccctcaagcagttcttgccgccaggaaccaccggggctgcggcctctgccgccgagtatggtttccgcaaagagagggcggcgctggaacagttgcagggtcacagaaacatcgtgactttgtatggagtgtttacaatccacttttctccaaatgtgccatcacgctgtctgttgcttgaactcctggatgtcagtgtttcggaattgctcttatattccagtcaccagggttgttccatgtggatgatacagcattgtgcccgagatgttttggaggcccttgcttttcttcatcatgagggctatgtccatgcggacctcaaaccacgtaacatattgtggagtgcagagaatgaatgttttaaactcattgactttggacttagcttcaaagaaggcaatcaggatgtaaagtatattcagacagacgggtatcgggctccagaagcagaattgcaaaattgcttggcccaggctggcctgcagagtgatacagaatgtacctcagctgttgatctgtggagcctaggaatcattttactggaaatgttctcaggaatgaaactgaaacatacagtcagatctcaggaatggaaggcaaacagttctgctattattgatcacatatttgccagtaaagcagtggtgaatgccgcaattccagcctatcacctaagagaccttatcaaaagcatgcttcatgatgatccaagcagaagaattcctgctgaaatggcattgtgcagcccattctttagcattccttttgcccctcatattgaagatctggtcatgcttcccactccagtgctaagactgctgaatgtgctggatgatgattatcttgagaatgaagaggaatatgaagatgttgtagaagatgtaaaagaggagtgtcaaaaatatggaccagtggtatctctacttgttccaaaggaaaatcctggcagaggacaagtctttgttgagtatgcaaatgctggtgattccaaagctgcgcagaaattactgactggaaggatgtttgatgggaagtttgttgtggctacattctacccgctgagtgcctacaagaggggatatctgtatcaaaccttgctttaatcagtaacctaaggactgtttcctttttctcctcttccatttcttgggttattccacatatgaatgcaggactacccccttaccattttaagaaggtactttatacatttatttaatcctactaatgtgcagccattgcccaagcagtgactgcgttgcatacatttggcactgagtaggacaagacctctcagctatacattgaggggttttagagcatccatgtgggcaacccttttttgtgcgggagagcaggtgttgctcttcagtatgtagcctaaaaaaatcttaattatttcatggatcatgaagcaaggatgaataatatcatgtcttggtaaatactaacaaatttgttaggtttggtgacatcatttacagattatttctttatgttgtccagtggttcttccttattgttgatatccataagctggcactggatgctctcagtaatgttaagtaattgtcaagcagcagttacctactgtgttcttaacactgagttgtgaattttttcttaaagcagtactgtagtactgaatattcctttaaaggaactgcagtgagcctatctaagtttttttaaattaaggcttttaaaatagaaagctgatgcttgatcttgcacaatttttatgtctagtatgtatgcttgagtgaatgtgtgagtatgaatgattagagaaaatttgagtcagtgtactttatagtgtgaatcctgtgagctaatacagtctatacttatttcttccctacctgtttcacatccgtaagatttaggatatacattttttgagaggtagtctgtctgatacaatgtaaatgacaaaacataattcctgagaggcccagaacaaactggagtctagcctggagttaaattgagacttctaaaatgattggaacaaagactaagttgtgccagatgtaaatcaacccctcttttagtttactttagactttgtattagctcatcttttttgtagtaaatctatagttttaaggtttctcaagatgtggctctacctactatgatgaaaattgaagtgggtcaaaagaattagatgtacagtgaagggaaaagaaaaaaaatgggcgaagagagggtggaaaataaaaggattcttttttcttcctttctgtttctcgtatccctgctccctttttcctccccttccctcattctttgcctctatccttagctgaagacaaactagaggagcagcatcccaggtagtttggcttttgactgcaaggtagttaagaaaggtgtagatataatgaggtagaagtagaaaggaagaaaaactcaaagaattctgaaaaggattcatagcaacataatgtgtccctgagtagaggatgctgctatgcgtgagttcatggacacaagttgattacatggtttttagaattataattatggattcttcttatttcatggtaggttgtctttaaagatataaaaattaggatgcctttatgaagcactgattatacc

SEQ ID NO: 677 - DNA, 4449 bp, Human
  unsure 2585: unknown base
  unsure 2586: unknown base
  unsure 2587: unknown base
  unsure 2588: unknown base
  unsure 2589: unknown base
  unsure 2590: unknown base
  unsure 2591: unknown base
  unsure 2592: unknown base
  unsure 2593: unknown base
  unsure 2594: unknown base
  unsure 2595: unknown base
  unsure 2596: unknown base
  unsure 2597: unknown base
  unsure 2598: unknown base
  unsure 2599: unknown base
  unsure 2600: unknown base
  unsure 2601: unknown base
  unsure 2602: unknown base
  unsure 2603: unknown base
  unsure 2604: unknown base
  unsure 2605: unknown base
  unsure 2606: unknown base
  unsure 2607: unknown base
  unsure 2608: unknown base
  unsure 2609: unknown base
  unsure 2610: unknown base
  unsure 2611: unknown base
  unsure 2612: unknown base
  unsure 2613: unknown base
  unsure 2614: unknown base
  unsure 2615: unknown base
  unsure 2616: unknown base
  unsure 2617: unknown base
  unsure 2618: unknown base
  unsure 2619: unknown base
  unsure 2620: unknown base
  unsure 2621: unknown base
  unsure 2622: unknown base
  unsure 2623: unknown base
  unsure 2624: unknown base
  unsure 2625: unknown base
  unsure 2626: unknown base
  unsure 2627: unknown base
  unsure 2628: unknown base
  unsure 2629: unknown base
  unsure 2630: unknown base
  unsure 2631: unknown base
  unsure 2632: unknown base
  unsure 2633: unknown base
  unsure 2634: unknown base
  unsure 2635: unknown base
  unsure 2636: unknown base
  unsure 2637: unknown base
  unsure 2638: unknown base
  unsure 2639: unknown base
  unsure 2640: unknown base
  unsure 2641: unknown base
  unsure 2642: unknown base
  unsure 2643: unknown base
  unsure 2644: unknown base
  unsure 2645: unknown base
  unsure 2646: unknown base
  unsure 2647: unknown base
  unsure 2648: unknown base
  unsure 2649: unknown base
  unsure 2650: unknown base
  unsure 2651: unknown base
  unsure 2652: unknown base
  unsure 2653: unknown base
  unsure 2654: unknown base
  unsure 2655: unknown base
  unsure 2656: unknown base
  unsure 2657: unknown base
  unsure 2658: unknown base
  unsure 2659: unknown base
  unsure 2660: unknown base
  unsure 2661: unknown base
  unsure 2662: unknown base
  unsure 2663: unknown base
  unsure 2664: unknown base
  unsure 2665: unknown base
  unsure 2666: unknown base
  unsure 2667: unknown base
  unsure 2668: unknown base
  unsure 2669: unknown base
  unsure 2670: unknown base
  unsure 2671: unknown base
  unsure 2672: unknown base
  unsure 2673: unknown base
  unsure 2674: unknown base
  unsure 2675: unknown base
  unsure 2676: unknown base
  unsure 2677: unknown base
  unsure 2678: unknown base
  unsure 2679: unknown base
  unsure 2680: unknown base
  unsure 2681: unknown base
  unsure 2682: unknown base
  unsure 2683: unknown base
  unsure 2684: unknown base
  unsure 2685: unknown base
  unsure 2686: unknown base
  unsure 2687: unknown base
  unsure 2688: unknown base
  unsure 2689: unknown base
  unsure 2690: unknown base
  unsure 2691: unknown base
  unsure 2692: unknown base
  unsure 2693: unknown base
  unsure 2694: unknown base
  unsure 2695: unknown base
  unsure 2696: unknown base
  unsure 2697: unknown base
  unsure 2698: unknown base
  unsure 2699: unknown base
  unsure 2700: unknown base
  unsure 2701: unknown base
  unsure 2702: unknown base
  unsure 2703: unknown base
  unsure 2704: unknown base
  unsure 2705: unknown base
  unsure 2706: unknown base
  unsure 2707: unknown base
  unsure 2708: unknown base
  unsure 2709: unknown base
  unsure 2710: unknown base
  unsure 2711: unknown base
  unsure 2712: unknown base
  unsure 2713: unknown base
  unsure 2714: unknown base
  unsure 2715: unknown base
  unsure 2716: unknown base
  unsure 2717: unknown base
  unsure 2718: unknown base
  unsure 2719: unknown base
  unsure 2720: unknown base
  unsure 2721: unknown base
  unsure 2722: unknown base
  unsure 2723: unknown base
  unsure 2724: unknown base
  unsure 2725: unknown base
  unsure 2726: unknown base
  unsure 2727: unknown base
  unsure 2728: unknown base
  unsure 2729: unknown base
  unsure 2730: unknown base
  unsure 2731: unknown base
  unsure 2732: unknown base
  unsure 2733: unknown base
  unsure 2734: unknown base
  unsure 2735: unknown base
  unsure 2736: unknown base
  unsure 2737: unknown base
  unsure 2738: unknown base
  unsure 2739: unknown base
  unsure 2740: unknown base
  unsure 2741: unknown base
  unsure 2742: unknown base
  unsure 2743: unknown base
  unsure 2744: unknown base
  unsure 2745: unknown base
  unsure 2746: unknown base
  unsure 2747: unknown base
  unsure 2748: unknown base
  unsure 2749: unknown base
  unsure 2750: unknown base
  unsure 2751: unknown base
  unsure 2752: unknown base
  unsure 2753: unknown base
  unsure 2754: unknown base
  unsure 2755: unknown base
  unsure 2756: unknown base
  unsure 2757: unknown base
  unsure 2758: unknown base
  unsure 2759: unknown base
  unsure 2760: unknown base
  unsure 2761: unknown base
  unsure 2762: unknown base
  unsure 2763: unknown base
  unsure 2764: unknown base
  unsure 2765: unknown base
  unsure 2766: unknown base
  unsure 2767: unknown base
  unsure 2768: unknown base
  unsure 2769: unknown base
  unsure 2770: unknown base
  unsure 2771: unknown base
  unsure 2772: unknown base
  unsure 2773: unknown base
  unsure 2774: unknown base
  unsure 2775: unknown base
  unsure 2776: unknown base
  unsure 2777: unknown base
  unsure 2778: unknown base
  unsure 2779: unknown base
  unsure 2780: unknown base
  unsure 2781: unknown base
  unsure 2782: unknown base
  unsure 2783: unknown base
  unsure 2784: unknown base
  unsure 2785: unknown base
  unsure 2786: unknown base
  unsure 2787: unknown base
  unsure 2788: unknown base
  unsure 2789: unknown base
  unsure 2790: unknown base
  unsure 2791: unknown base
  unsure 2792: unknown base
  unsure 2793: unknown base
  unsure 2794: unknown base
  unsure 2795: unknown base
  unsure 2796: unknown base
  unsure 2797: unknown base
  unsure 2798: unknown base
  unsure 2799: unknown base
  unsure 2800: unknown base
  unsure 2801: unknown base
  unsure 2802: unknown base
  unsure 2803: unknown base
  unsure 2804: unknown base
  unsure 2805: unknown base
  unsure 2806: unknown base
  unsure 2807: unknown base
  unsure 2808: unknown base
  unsure 2809: unknown base
  unsure 2810: unknown base
  unsure 2811: unknown base
  unsure 2812: unknown base
  unsure 2813: unknown base
  unsure 2814: unknown base
  unsure 2815: unknown base
  unsure 2816: unknown base
  unsure 2817: unknown base
  unsure 2818: unknown base
  unsure 2819: unknown base
  unsure 2820: unknown base
  unsure 2821: unknown base
  unsure 2822: unknown base
  unsure 2823: unknown base
  unsure 2824: unknown base
  unsure 2825: unknown base
  unsure 2826: unknown base
  unsure 2827: unknown base
  unsure 2828: unknown base
  unsure 2829: unknown base
  unsure 2830: unknown base
  unsure 2831: unknown base
  unsure 2832: unknown base
  unsure 2833: unknown base
  unsure 2834: unknown base
  unsure 2835: unknown base
  unsure 2836: unknown base
  unsure 2837: unknown base
  unsure 2838: unknown base
  unsure 2839: unknown base
  unsure 2840: unknown base
  unsure 2841: unknown base
  unsure 2842: unknown base
  unsure 2843: unknown base
  unsure 2844: unknown base
  unsure 2845: unknown base
  unsure 2846: unknown base
  unsure 2847: unknown base
  unsure 2848: unknown base
  unsure 2849: unknown base
  unsure 2850: unknown base
  unsure 2851: unknown base
  unsure 2852: unknown base
  unsure 2853: unknown base
  unsure 2854: unknown base
  unsure 2855: unknown base
  unsure 2856: unknown base
  unsure 2857: unknown base
  unsure 2858: unknown base
  unsure 2859: unknown base
  unsure 2860: unknown base
  unsure 2861: unknown base
  unsure 2862: unknown base
  unsure 2863: unknown base
  unsure 2864: unknown base
  unsure 2865: unknown base
  unsure 2866: unknown base
  unsure 2867: unknown base
  unsure 2868: unknown base
  unsure 2869: unknown base
  unsure 2870: unknown base
  unsure 2871: unknown base
  unsure 2872: unknown base
  unsure 2873: unknown base
  unsure 2874: unknown base
  unsure 2875: unknown base
  unsure 2876: unknown base
  unsure 2877: unknown base
  unsure 2878: unknown base
  unsure 2879: unknown base
  unsure 2880: unknown base
  unsure 2881: unknown base
  unsure 2882: unknown base
cgggcctggagagggtggctacattgaactaatccaagatggcgccgaggttgtaaccgggagcgcccaagaggcgggaattaccctgatccaagatggcagtggcaactgaggcaagccgaaagacgggagcgccaggagcgtctttgccctcagccaagatggcggctgccgtggaccctgtcccggctccgccccgcggccctggccccgcctgcccctcgtcccttcctccgccccctctcctcgcgtagtccggcccgagccgctcgcgctaggagagcgggcttcgggcacttgacatggcggcagtggcggcgactgcagcagcgaaggggaatgggggcggcggtggcagggccggggccggggacgccagcggcacgcggaagaagaagggcccggggcccccggccacggcgtacctggtcatctacaatgtggtgatgacagccgggtggctggttatagcggttggtctggtccgagcatacctggctaagggtagctaccatagcctttattattcaattgaaaagcctttgaaattctttcaaactggagccttattggagattttacattgtgctataggaattgttccatcttctgttgtcctgacttctttccaggtgatgtcaagagtttttctaatatgggcagtaacacatagcgtcaaagaggtacagagtgaagacagtgtcctcctgtttgttattgcatggacgatcacggaaatcatccgttactccttttatacattcagtctattaaaccatctgccttacctcatcaaatgggccaggtacacacttttcattgtgctgtacccaatgggagtgtcaggagaactgctcacaatatatgcagctctgccctttgtcagacaagctggcctatattccatcagtttacccaacaaatacaatttctcttttgactactatgcattcctgattctaataatgatctcctacattccaatttttccccagttatacttccacatgatacaccagagaagaaagatcctttctcatactgaagaacacaagaaatttgaatagttcctgctttctgcacctcccaccaaaacaaacttttcaatgatcaaaaaatgctgcagattttttgagttcccaatacgtttcatagaaaataagtaagaactatttttaaaatattcaaacaaaactaaaacaaaaatccagtgtcacatgggcctgagattttattttagaaaaaggttgttacataaaacaccctggccagttcatttcagcatgctctttcaaccagaagttcttaatatttatgatggcactagaaagggatttggcattttatgtccttctgtgtccttcatgtatctgatcaatgaagacctgtaacactaagtacttgagagttacagtctgaataatgaagtcgtaccagctgaatagcccagcttgcagtatagttatgtttcagtctgcagtgtgtttagcattcccttgtcaaagtgcttgactgcatgctggaaactttgtatttttgaagcggcaaactctgttctctggaatgctctgaagttatggctgggacctatcccctcacatctaatgaatgaattataaaatgtatatgtctatgaagcttcggggtagtgcctgtaatcagaaaacaacttagaacccttttgtttgtttccaattgagtcattactgcctgccactaagaaacgtgcttgaatctaataagtatgtgtgtaccgtaaagaatatatcttatctggagctcagcctcaatcatgtcttaacaaaatgacaggtctcagaaagggggagctcaatagctcaaaagtgacaagtccttttcacagcaccgttctcagaacacctctgagtaacgtgtttgccagtagctattctcactgatgcactgatggccctgaagaagcggatccagtcacataggaaaggaggctgtgttagtgaaagcacatggaaggtgttgctttagaaaggtagtcaggaaaaacattcaggaatagatttatacaccattattgttttatttttaaattttcattcactcttctgtttggatacttttgctaattaacgtcctatgttaatttccaccaagctataagtccatagtcagtaaaacattccccttgggctgtcatgagctaaaagcagtgtcatctccgcatgttggagcagccaagaaatagtttggtactaccgacatcgtctaatccatgtcacatcctcatacaatttaattgctcaaccatgcatttaaaactcctcaagaaaggattggtactgcaactgtaggtaaactgaaaaaaaataagaaagaaagagttggatgaaaatgtgaaagcccaagtttagatgtgcattaagtattaaatagcacagtatcttcttcatggagccttttttcctcccccatcccctgcagctgcctttttttgggggcagggtgggggttgatgttgaactttaagagtttaaaagtttagcttattgagtagttgtcatttaaaatataattgcgaatatcagaaaactcatactggaaaactaaannnnnnnnnnnnnnnnnnnnnnnnnnnnnnnnnnnnnnnnnnnnnnnnnnnnnnnnnnnnnnnnnnnnnnnnnnnnnnnnnnnnnnnnnnnnnnnnnnnnnnnnnnnnnnnnnnnnnnnnnnnnnnnnnnnnnnnnnnnnnnnnnnnnnnnnnnnnnnnnnnnnnnnnnnnnnnnnnnnnnnnnnnnnnnnnnnnnnnnnnnnnnnnnnnnnnnnnnnnnnnnnnnnnnnnnnnnnnnnnnnnnnnnnnnnnnnnnnnnnnnnnnnnnnnnnnnnnnnnnnnnnnnnnnnnnnnnnnncctggaaaactaaatttttaagtgcttatttttatagaagtttgaaaatttaatgcaggcaggtgtgtaataaattatttttgaattgaacattaaaattctgcttcttaaagtcagcactcaacttggacatgttgaaattagaatctattcttgtatttgatagacaaaatatgtgggaaagattttttgcatgacttttctctcattttattcttccataatgtatttctactataaaatagaatcaacttgggttatatttgtcatttactttgttctgttagattttttcagttgtttttggaaaaattctagaaatcaggatgaaaaatgcagcttttccagggttgctggactgggggttttatttgggcctccttattataatttgtcactacttataaaaaacattctgttgcaaacagtggtgttgcattgaattgaactttggcaatgagaacacagcacacagctcccttttcaaaaagggtctcaaccccagtgtgtatttttgtacatcaacatttagaatacttatggcagataagtaaggcatgtcactgtgtccttcagtaacctctctcagtaactggtttctttatccctaacatgaattcatttctcctttgaagtcatttattattttataaattgagaacaaccacaccaccaaatgtcacaccttcttataaagtgtgaacaaggaaggtcatgtttttgtgggtattttgtcagacttagaggtttcatttcagggcatagtcaaaggcatcatcctcccaactacccacttgattatgtatttcagatccctccgtgggggccttcttctgacagagaattctttgaggtccgcagtagtgcttttgtcagcacagactgctaatctacatcttgctgcgttctgtttgctgaggttgggcttattcatttaacacgtaccaaccattatccagaggcaccatggagagttagtcatggaataaagcactgtccttgcagatgaaaaaagtctccagagcagacttctgacaggaaaggtttagatgctggagagttgaagaggtgtaagaagagatcgtgccctcatttttcacttatttttttggttattcatttataataaaaggttggcattgatatggtacaacctgcaaattacttgcagttctgagtttcagataaaacattataaaacattaaattcaatacatactgctcctttgaaatttgggtaaaaaattgtacaaccgtatatatagtcatttttgtattttttctatgttgtgaaaaccaaaattgtaattttataagtctttgattcactaaaattatataatttaaatgtattttttgtatatttagaaataaggagtccagagactacgcttaactttctatgcatgcatttgaaagctgtttttacctgataatgtagtaataagttgtattcataaaatactgatctgtgttgcatttcaaaataaactggtgtgtgctctgcctggatttgaaatacctaaaaaaaatctatgtcgggtgcggagaaagaggtaatgaaatg

SEQ ID NO: 678 - DNA, 1437 bp, Human
tgggtgtgggggtgggtagggatggggaacccaagccccagtaggagttggggctgagatcaggaggaggggaaggatatgagttttccatccatctccctggagaaggccatgacgggctctccaagccctggggagatctggcgagggactagccaagtcagggtgacctcttgacctgactagtttttctaacccacatgaataccagggtgcctctctcttcctctagcccagggtagggggacctgcagtgagagagagagttgagcacagacagcaagattgagacacgcgggcccccactggtctctgagtgggaaaggcaagtgcgagagataaaggcctccaagagaaaaaagaaacaaaccaaagatttaaccatttaaaaaaaaaaaaaaacccacagacaactccgctacctttttatatgttggaaaaaaagtgaaaaaaaattaaaaataaaaataaaaaaaaatacacaaaaactccaagccgcaagtccttcatgcggtttaaactttgacctcagcagtctccaaagcaagacgacgatgacaaaggcggaaacaaagaaaaaataatgtatatttttaagtatttgtccttgaattgttagctccttgttaaacaaacaaaaggagagaaaaatccagagagaagtgttgctgggatggagacaactatttactatgtctgtgacccctcccttctgcctccctccccttcctctctttcctgtcctctatccttgctgcccctcccccaatatgtcccccaaacccaggggctcagtatttatttatttatataattgcagggtgactgggggcctctctcggcaactcgtagagagcctttggataatggcagggtggggaatgggcgaggagtctttgggaagagcaggggcctgaactttcaactcctttctggcctcttgtcccactgcttccaccatcaccttccaaatccagggctgcactagggcaaggtgaccaccctacttggtaaagacctgattggcgcagcccattctggtgtgggtgtctttcaccacccagaatgaccaggttggaatgggggtgggtgaagttggagggggtggcaagtacaaggcaagggtgcccaggaaccggcatccagaaatcagccctggagtagacctgcctttcctccatccttaccaagttagcctccctttcagttccgtctgacccctgtgttggtagccccttccttcccttcctgtaccccctccgtctcttctcgtggtagcgggttagtgtttcagtgttcttaactccaatctgcttgttcattgtacaatgtgcttcttttaaggccccatttttgtaacttgagtgtgtcattcatctgaacaacaaacatcaaaaaataaaaaattaaaaactgtacagcgacaggttgctaggg

SEQ ID NO: 679 - DNA, 2485 bp, Human
atggcgaacgcgagcgagccgggtggcagcggcggcggcgaggcggccgccctgggcctcaagctggccacgctcagcctgctgctgtgcgtgagcctagcgggcaacgtgctgttcgcgctgctgatcgtgcgggagcgcagcctgcaccgcgccccgtactacctgctgctcgacctgtgcctggccgacgggctgcgcgcgctcgcctgcctcccggccgtcatgctggcggcgcggcgtgcggcggccgcggcgggggcgccgccgggcgcgctgggctgcaagctgctcgccttcctggccgcgctcttctgcttccacgccgccttcctgctgctgggcgtgggcgtcacccgctacctggccatcgcgcaccaccgcttctatgcagagcgcctggccggctggccgtgcgccgccatgctggtgtgcgccgcctgggcgctggcgctggccgcggccttcccgccagtgctggacggcggtggcgacgacgaggacgcgccgtgcgccctggagcagcggcccgacggcgcccccggcgcgctgggcttcctgctgctgctggccgtggtggtgggcgccacgcacctcgtctacctccgcctgctcttcttcatccacgaccgccgcaagatgcggcccgcgcgcctggtgcccgccgtcagccacgactggaccttccacggcccgggcgccaccggccaggcgaccgccaactggacggcgggcttcggccgcgggcccacgccgcccgcgcttgtgggcatccggcccgcagggccgggccgcggcgcgcgccgcctcctcgtgctggaagaattcaagacggagaagaggctgtgcaagatgttctacgccgtcacgctgctcttcctgctcctctgggggccctacgtcgtggccagctacctgcgggtcctggtgcggcccggcgccgtcccccaggcctacctgacggcctccgtgtggctgaccttcgcgcaggccggcatcaaccccgtcgtgtgcttcctcttcaacagggagctgagggactgcttcagggcccagttcccctgctgccagagcccccggaccacccaggcgacccatccctgcgacctgaaaggcattggtttatgagggaggccccgccacatagacccccaacccagcctttccctttggctcggacggtgacgttgtatcttttccttctggcccctgtttaattttctaagctgccttcaaaatgactcgaagtggacagacacttggattgtactgactcctttgggggtggggtgggtgaggagtaggatgctcagcccactccagctccgcacattcgtcctcctaactcgactttcttcctgacaataggccctgcagtctttttgtagcggtactgacgtcttttattccatgtgtggttcctttttttctttttctataaaggctgtactaattttcttcatgcaacgtttcctaaagaccatggccagttttctacagaagctatttttgacaacctcaagtggcattacattttgcagtgaagtagaggaacctagggggacttcttcacaagttagatttcttgaggatcttctgttggaagcaggagaaagtggggggtggggggaagttgtccgaaatgccctctgaattgccggctgcagggtccttgtgctgcgctggttctttgaaagtctcagtgttgatattgaacttaaagagcagagatggagatcagtagcaaggcagtcatttttttaaagcagtaagtaacaagtaagatttggttcccggtttactttctgctgctaaaaaccacgtcagtgacaactgctctctgtattatagcaatcttgaatggaaacatttctgtcaagttgtaagttttaaaagagtaaagtgttttggttagtaatgatgtggagaaaaatacagtattgcatgtgttcgtgtgtatagattgtggttcgaggattgggagggctctgagaagcagagtactacatcaaaattgttttaagtattttttgccaataaaaaattaattttatggaaatggcttgtgctttgagaagcccagttttattctgtcttatgaaactaatttccactttgaaaattgttcttctgttgtttatggtataaatgaatggaatataatgatatcctccttctaggaaacaaagcatttccttaaaatgtttgctaggttaagctgtgctgttctactgatggttgttttaaattaataatgagaactataatttaaataatatttctttgttagacattataatgttaaactgaaagactaaattctgcaagtactatataatatttttggcttataatgctacatttttattaatgtaccttccgttttgaggatttatatctgtatttctctttgcattatacaaatataccagtattttcaaaaaaaatctatgtcgggtgcggagaaagaggtaatgaaatggca

SEQ ID NO: 680 - protein, 375 aa, Human
MANASEPGGSGGGEAAALGLKLATLSLLLCVSLAGNVLFALLIVRERSLHRAPYYLLLDLCLADGLRALACLPAVMLAARRAAAAAGAPPGALGCKLLAFLAALFCFHAAFLLLGVGVTRYLAIAHHRFYAERLAGWPCAAMLVCAAWALALAAAFPPVLDGGGDDEDAPCALEQRPDGAPGALGFLLLLAVVVGATHLVYLRLLFFIHDRRKMRPARLVPAVSHDWTFHGPGATGQATANWTAGFGRGPTPPALVGIRPAGPGRGARRLLVLEEFKTEKRLCKMFYAVTLLFLLLWGPYVVASYLRVLVRPGAVPQAYLTASVWLTFAQAGINPVVCFLFNRELRDCFRAQFPCCQSPRTTQATHPCDLKGIGL

SEQ ID NO: 681 - DNA, 1065 bp, Human
catttatcatgccatgctaccgcactcatcccatccatccaaccttgccaaccatttatccacccatccaactatttccatctgttcattttccacccatttacccatctactaattcactcatccatccacctacctatccatttatcatccatctacccactcacccatccatccatccttccaaccatttatccacccatccaaccatttccatctgttcatttccatccatctacccatctacccattcactcatccgtccacctatccatttatcacccatctacccatccatccacccactcatccatccattcatccatccacccacccacccgtccatccacctacctattcatttatcacccatccatccacacacgggtctgtgcagattcattaatatccacccatgcatccatatttatctattttctatccatcagccatccattcattcatatccatccatccatctatccatccagatgtttattgagcacctgtgttctgggtcctatttgggagccttgttaaccaccaagaccttcctaagccatattgtggtatacagacagatacaaaaaaaaaggctctctccctgtctgatctcatgcagcctgccttggagacaagactctcccagtgctgtgtgcttggagagaggaaagcacacagccctggagtcagagacctgggtttcaattctgtctccacctcttattagctagctatggactcctctctgagcctcgattacctcatctgtgaaatggggtaatggtgtgagcagcgtttccctgggggatgtgatgcagcccacttggggcctcatgcactcagcatctctttattagcaaacacttattgaacccctagtacatgccaggcactgttatgaggtcccggggatactttataacaaaagggacagaagcattcctgctcttgtgaagtttacattgactagatagtaaacaaaataaatgaaatatgcagtgtgtcagtgctggtaaacccgtggagaaaataaagcaaggttggggtctggggttgggaatt

SEQ ID NO: 682 - protein, 243 aa, Human
FIMPCYRTHPIHPTLPTIYPPIQLFPSVHFPPIYPSTNSLIHPPTYPFIIHLPTHPSIHPSNHLSTHPTISICSFPSIYPSTHSLIRPPIHLSPIYPSIHPLIHPFIHPPTHPSIHLPIHLSPIHPHTGLCRFINIHPCIHIYLFSIHQPSIHSYPSIHLSIQMFIEHLCSGSYLGALLTTKTFLSHIVVYRQIQKKRLSPCLISCSLPWRQDSPSAVCLERGKHTALESETWVSILSPPLIS

SEQ ID NO: 683 - DNA, 5366 bp, Human
  unsure 5360: unknown base
  unsure 5361: unknown base
  unsure 5363: unknown base
  unsure 5364: unknown base
gaaatacacaaaataactctttagcttgctctgagcatttttttcttttctgatagcaactttttaacgttgtggatccacagaacttactgctttgctttctcttttggggtcacaattcctctccccttggagtgtccactccatgcatgtgcacttaggatgtgtggctgtgtgtgtgtttgggaaccctcacggacacataaggttctatgtcatcaagtagaaaacctatctcattatcattataatgtcttcagatgctttctaaggttcacctcttttttaacattagaagtcagtgaatgcagctttcattataatttttaatactttaaaatgtttttgtattagctgccagaatgctcagcagcaaagttatgactcacttctagcaagtgtggtagttcttgcttcaagcatttggtttcatgtagcttttcttcttattttttctttgtcttgattttatcattacttaaaacaattctgttgaatattaacacttggaaaatgaaaaaaagtggagaaataaatcaatgaataaacaaatattttaagtggcataggcacagcatttaatattttgcttcagtagttcttaattaaaaaaaaaaaatccctcattttggtaagcactagggatttaccaacatttagcaaatgatttctgttacacatactcttaaaatattcagtctatttatactatttattaatttcctctttatcataaaacttttattcacataaaaacacattataaactttcaatgtggttgcaggagccttcattccaggagttccagtgcagccagtcctcctcagatacccaaacaagctggatactgtgacctggacatggcaaggatatacattcattcagctttgtatgcttactttctgccagctcttcacaaaggtagaagttgagtttatgccagttcaagtaccaaatgatgaagaaaaaaaatgatcctgtcctttttgccaataaagtccggaatttaatggcagaagctctaggaataccagtaacagatcatacctatgaagactgcagattgatgatttcagcaggacagctaacattgcctatggaagctgggctggtggaatttactaaaattagccgaaaattgaaattagattgggatggtgttcgtaagcatttggatgaatatgcatctattgcgagttcctcaaaaggaggaagaattggaattgaagaattcgccaagtatttaaagttgcctgtttcagatgtcttgagacaactttttgcactctttgacaggaaccatgatggcagcattgacttccgagagtatgtgattggcctggctgtcttgtgcaacccttccaacacagaggagatcatccaggtggcatttaagctgtttgacgttgatgaggatggctacataacggaggaagagttctccaccattctacaggcttcccttggagtgcctgaccttgatgtttctggtctcttcaaggaaatagcccaaggggactcaatttcctatgaggaatttaaaagttttgccttaaagcatccagaatatgctaagatatttacaacatacctagacctccagacgtgccatgtgttttcattaccaaaagaagtccagacaaccccctccaccgccagtaataaagtcagccctgaaaagcatgaagagagtacctcagacaaaaaagatgactgaaagcagtatttccaataaggaaaacacagtagcttttgcttgaaattgtaaaggcacttattgataatacttttaatgtgttggtaatgatgtttaaaattgaaagatttttaaaacaaaaatgatagattttcttactaaaaatgtttttattaaccttgcttttattggaaaaaatcaagcaatatttcgttttcttttgtgttatattgtactttactgattcatttactggtgatacatatgtttttatggattttccagtttaatttgcatatacaaatgaatgcaatggtctattggtgagcattgagcaacactgtataaagttttaaaaatgtaaacactttttaatctactttcctctaaaaatcaataatattctattatttctaatccttttccacttgggaaataacaatgaagaatctgagaatttgacatctataactttacagattcatttttccatttaaatttcagtttcttggatcactgaatatgggaagggagagcttcactaattagacgcagcttcttaagaacttatattctctttgacatacatctctattgtagttttttgttttgttttgttttttgagatggagtcttgctctgtcacccaggctggagtgcagtggtgcaatctcagctcactgcaacctctgcctcctgggttcaagtgattctcgtacctcagactcccgagtagttgggattacaggtgcccaccaccacacccgactaatttttgtatttttagtagccatgtggttttgccatgttggccaggctggtttcgaactcctgacctcaggtgatccacccacctcagcctcccaaagtgctgggattacaggtgtgagccaccgttcccggcctattgtagattttcttaactacttgctaaggaaatcatatccttttacatgaactacaggtttagaacttggttttaagacaactgctatggccagaaggtaaatgggaattgccttattgaaggtaacattgattgcctaataagaaaatgaattgtttaccacagagttgaatttaatttgagttagatagttcagaatgtagcacttgccctataaatgaatcagatttgttctatttatataatattagaattaatatattatcatgtaagtgggaattttattttgttaagtggactctcaaattttagaacttgtgtgaaatatctcccagaaaacacaaaaggtttcaaggtatcacccaaagctagggaatcaacaaacgtactttattaatgcaagaccacaatttaagccccaggcaggaatccaacagtaacatttttcctttaggttaagcagtaatttttttgaattgtcatttttaatgggtctcacacatgcatattgctaatatcattcatgtttgaggttttcaacaaagaaccaatttattaatataatgtacaaaaatagttggttcattttctgaattcagtctttgaaataaaactccttgttttggccgtgtttctgaatgtattggtgattcacccccaagctaattttttaaagtcatttttgaagttgggaagtctcatgagagatgttgaagtatgtatttaatcaagagtcatgatttcaaactagttttacatattaagcagttagtgttctaatttaatgggtaaatgtgtgtttggataaatatctgaaaattttatccttaagtatatataattatttgcctcttatatgtcttaaagctatttaaacaaggtgttaaatgagccaaaacaattaagtaattagaacagtacatttttatcagagtgtctgtcatatgcaatgaatgtatgtaatactaaaaaatcatgactacttttatcaaagaaaaaccacacattaatcctattaatcatgaaagcgtagcattgtaaattaaaggttttctttgaggctcttgaaagtgatcccattgctttcctgttttaaaaatattttatgctctttatttccacttctgtgaatgtgatatttctattttgtgattatgttactgaataaacaaacttgctacataaaattcttagcaattaaaaaaattctgattctgccattttgtctcaaatgtaatatacccttttaatatcatatgtttacatatttatgaatgattaatcatttttgtttgcattaaactttatgaaatgtcagaaatgattttactctaatgaaactcaaattttgcccaaagtagcaatattcttaaagatgttgaattttgactggttgaattttatatagtaacacacaagtcgtgatcatcaatattattgcagaccaggactctgcttatatgccttgctaacaaagatttctttcacagaggcttttctcctctcaagacttaaagtaagaattacattttattaagtcagttaaatgcaccatggcttcatatagtaatataaaaaaactctttgaagtgagaaatattatatcctaaaacctctaaaccacaaacattcaattgaaagagttctgttgaaggataatgacatactgactgcttacagaccaagttgcttgcattttgtatgtttagccctcctttgccactgcttttagagccttggaaggctaagtgtgatagtaatgctagctctaatgcatatttaaaggagactgcctcgcttttagaagacatctggtctgctctctacatgaggcacagcagtaaagctctttgattcccagaatcaagaactctccccttcagactattaccgaatgcaaggtggttaattgaaggccactaattgatgctcaaatagaaggatattgactatattggaacagatggagtctctactacaaaagtctttgggtatttgtttcttacatagaaaatgctaacatgaatagaaagatactggtgcaagaccattcccgggaaagtagacatacttacatttttttccttttctgctcatttgaatgaactcaattttatgttaaattgttatatcagagtgacaaataagtgctatggcttgatagaagtgaagctcttcacatatattcaaaatacatatcacaaactttggtaaataggatagtaatctgaagaacttttgccctttttaccccatttactgtaactcttgtttctaggtaatcgttctctctcaacaaacttctcaagcgtctgtgtaacaagccacatgttctaacaaattgtctccatcgcacttcaacagccaggtccctattttttataacgtattaaccttattattttcttattattttaaaagaatctatgcacattagcaaaatttaaaagatagagaaaaatataaacagaaaaaattatgtttacttctaccaccctaaatcaactattatcaattttatacatattttactccatcttttttcaaagtttcttacattttccaatgtcattaaaattctctgtgaatgtaaattttaaaaactgtacctactgttttttggaaatctgtaacaagctatgtgtaatcattcttctaatattaaacatattgtgtccagaaaaaaaaaaaaaaaaaaaaaaaaaaaaaaaaaaaaaaaaaaaaaaaaaaaaaaaaaaaaaaaaaaaaaaaaaaanntnntg

SEQ ID NO: 684 - DNA, 341 bp, Human
  unsure 70: unknown base
cacacaccatagtacacacgaaaatgtgcagatctgtaacatttttttcacagctgataaaaaaaaaaantactaccattctcccccagactcccctttgatacagtaggtaaacaaaatagattttttttccacaaatatcagcagacactttctggcaccccacactgtattggcatcagtgttaacagtcccagttcagatgtgcaatacttcagattggatacactgtaacaagaatccaactttgcatagacatcctcagaatcgcaatcagtcatggggttgcccttccaagctggcagaaaaggaacccgatcttaatttccagctactcctgg

SEQ ID NO: 685 - DNA, 1328 bp, Human
  unsure 496: unknown base
  unsure 497: unknown base
  unsure 498: unknown base
  unsure 499: unknown base
  unsure 500: unknown base
  unsure 501: unknown base
  unsure 502: unknown base
  unsure 503: unknown base
  unsure 504: unknown base
  unsure 505: unknown base
  unsure 506: unknown base
  unsure 507: unknown base
  unsure 508: unknown base
  unsure 509: unknown base
  unsure 510: unknown base
  unsure 511: unknown base
  unsure 512: unknown base
  unsure 513: unknown base
  unsure 514: unknown base
  unsure 515: unknown base
  unsure 516: unknown base
  unsure 517: unknown base
  unsure 518: unknown base
  unsure 519: unknown base
  unsure 520: unknown base
  unsure 521: unknown base
  unsure 522: unknown base
  unsure 523: unknown base
  unsure 524: unknown base
  unsure 525: unknown base
  unsure 526: unknown base
  unsure 527: unknown base
  unsure 528: unknown base
  unsure 529: unknown base
  unsure 530: unknown base
  unsure 531: unknown base
  unsure 532: unknown base
  unsure 533: unknown base
  unsure 534: unknown base
  unsure 535: unknown base
  unsure 536: unknown base
  unsure 537: unknown base
  unsure 538: unknown base
  unsure 539: unknown base
  unsure 540: unknown base
  unsure 541: unknown base
  unsure 542: unknown base
  unsure 543: unknown base
  unsure 544: unknown base
  unsure 545: unknown base
  unsure 546: unknown base
  unsure 547: unknown base
  unsure 548: unknown base
  unsure 549: unknown base
  unsure 550: unknown base
  unsure 551: unknown base
  unsure 552: unknown base
  unsure 553: unknown base
  unsure 554: unknown base
  unsure 555: unknown base
  unsure 556: unknown base
  unsure 557: unknown base
  unsure 558: unknown base
  unsure 559: unknown base
  unsure 560: unknown base
  unsure 561: unknown base
  unsure 562: unknown base
  unsure 563: unknown base
  unsure 564: unknown base
  unsure 565: unknown base
  unsure 566: unknown base
  unsure 567: unknown base
  unsure 568: unknown base
  unsure 569: unknown base
  unsure 570: unknown base
  unsure 571: unknown base
  unsure 572: unknown base
  unsure 573: unknown base
  unsure 574: unknown base
  unsure 575: unknown base
  unsure 576: unknown base
  unsure 656: unknown base
  unsure 657: unknown base
  unsure 658: unknown base
  unsure 659: unknown base
  unsure 660: unknown base
  unsure 661: unknown base
  unsure 662: unknown base
  unsure 663: unknown base
  unsure 664: unknown base
  unsure 665: unknown base
  unsure 666: unknown base
  unsure 667: unknown base
  unsure 668: unknown base
  unsure 669: unknown base
  unsure 670: unknown base
  unsure 671: unknown base
  unsure 672: unknown base
  unsure 673: unknown base
  unsure 674: unknown base
  unsure 675: unknown base
  unsure 676: unknown base
  unsure 677: unknown base
  unsure 678: unknown base
  unsure 679: unknown base
  unsure 680: unknown base
  unsure 681: unknown base
  unsure 682: unknown base
  unsure 683: unknown base
  unsure 684: unknown base
  unsure 685: unknown base
  unsure 686: unknown base
  unsure 687: unknown base
  unsure 688: unknown base
  unsure 689: unknown base
  unsure 690: unknown base
  unsure 691: unknown base
  unsure 692: unknown base
  unsure 693: unknown base
  unsure 694: unknown base
  unsure 695: unknown base
  unsure 696: unknown base
  unsure 697: unknown base
  unsure 698: unknown base
  unsure 699: unknown base
  unsure 700: unknown base
  unsure 701: unknown base
  unsure 702: unknown base
  unsure 703: unknown base
  unsure 704: unknown base
  unsure 705: unknown base
  unsure 706: unknown base
  unsure 707: unknown base
  unsure 708: unknown base
  unsure 709: unknown base
  unsure 710: unknown base
  unsure 711: unknown base
  unsure 712: unknown base
  unsure 713: unknown base
  unsure 714: unknown base
  unsure 715: unknown base
  unsure 716: unknown base
  unsure 717: unknown base
  unsure 718: unknown base
  unsure 719: unknown base
  unsure 720: unknown base
  unsure 721: unknown base
  unsure 722: unknown base
  unsure 723: unknown base
  unsure 724: unknown base
  unsure 725: unknown base
  unsure 726: unknown base
  unsure 727: unknown base
  unsure 728: unknown base
  unsure 729: unknown base
  unsure 730: unknown base
  unsure 731: unknown base
  unsure 732: unknown base
  unsure 733: unknown base
  unsure 734: unknown base
  unsure 735: unknown base
  unsure 736: unknown base
  unsure 737: unknown base
  unsure 738: unknown base
  unsure 739: unknown base
  unsure 740: unknown base
  unsure 741: unknown base
  unsure 742: unknown base
  unsure 743: unknown base
  unsure 744: unknown base
  unsure 745: unknown base
  unsure 746: unknown base
  unsure 747: unknown base
  unsure 748: unknown base
  unsure 749: unknown base
  unsure 750: unknown base
  unsure 751: unknown base
  unsure 752: unknown base
  unsure 753: unknown base
  unsure 754: unknown base
  unsure 755: unknown base
  unsure 756: unknown base
  unsure 757: unknown base
  unsure 758: unknown base
  unsure 759: unknown base
  unsure 760: unknown base
  unsure 761: unknown base
  unsure 762: unknown base
  unsure 763: unknown base
  unsure 764: unknown base
  unsure 765: unknown base
  unsure 766: unknown base
  unsure 767: unknown base
  unsure 768: unknown base
  unsure 769: unknown base
  unsure 770: unknown base
  unsure 771: unknown base
  unsure 772: unknown base
  unsure 773: unknown base
  unsure 774: unknown base
  unsure 775: unknown base
  unsure 776: unknown base
  unsure 777: unknown base
  unsure 778: unknown base
  unsure 779: unknown base
  unsure 780: unknown base
  unsure 781: unknown base
  unsure 782: unknown base
  unsure 783: unknown base
  unsure 784: unknown base
  unsure 785: unknown base
  unsure 786: unknown base
  unsure 787: unknown base
  unsure 788: unknown base
  unsure 789: unknown base
  unsure 790: unknown base
  unsure 791: unknown base
  unsure 792: unknown base
  unsure 793: unknown base
  unsure 794: unknown base
  unsure 795: unknown base
  unsure 796: unknown base
  unsure 797: unknown base
  unsure 798: unknown base
  unsure 799: unknown base
  unsure 800: unknown base
  unsure 801: unknown base
  unsure 802: unknown base
  unsure 803: unknown base
  unsure 804: unknown base
  unsure 805: unknown base
  unsure 806: unknown base
  unsure 807: unknown base
  unsure 808: unknown base
  unsure 809: unknown base
  unsure 810: unknown base
  unsure 811: unknown base
  unsure 812: unknown base
  unsure 813: unknown base
  unsure 814: unknown base
  unsure 815: unknown base
  unsure 816: unknown base
  unsure 817: unknown base
  unsure 818: unknown base
  unsure 819: unknown base
  unsure 820: unknown base
  unsure 821: unknown base
  unsure 822: unknown base
  unsure 823: unknown base
  unsure 824: unknown base
  unsure 825: unknown base
  unsure 826: unknown base
aaaaaagaaggaaacaaaggatcaacaaggattcagctgttttgtattcagctgaggtaagtggcggcatggagcatggagcgattatttacatttaaaagaaaagaattgaaagtaagcacctgtatctctatttttattctgtgggtcttccacaaacgctttcgtcttatttcagaaaacagcttctgtgttcagtcacaggagccatcggcaaagaatggaagtggaaatgctacctccagggtcttggtgagagaaagtacagctttacctgataggtgatttcccttggaatccatcagaactcgacaaagcatgattttctgagcctagtaaaatggttctgaatcaaaaccgaagtcacgctgtgctgccgatccctgtttgactctcaaaaccaaaatctgtatcaggaaaggaataatcatttagcagactgagtccaaaatgctcatttttggtttcctgtgaaaatggatttctttttgtcgcnnnnnnnnnnnnnnnnnnnnnnnnnnnnnnnnnnnnnnnnnnnnnnnnnnnnnnnnnnnnnnnnnnnnnnnnnnnnnnnnnaaacaagtccaggaggggctgttacttctttttagtttatttgtttttgtgaggcagggttttgctgtctggagcatcannnnnnnnnnnnnnnnnnnnnnnnnnnnnnnnnnnnnnnnnnnnnnnnnnnnnnnnnnnnnnnnnnnnnnnnnnnnnnnnnnnnnnnnnnnnnnnnnnnnnnnnnnnnnnnnnnnnnnnnnnnnnnnnnnnnnnnnnnnnnnnnnnnnnnnnnnnnnnnnnnnnnnnnnnngaggggctgttacatctgatcagggcaaaaggggctgtgctccttggacactttgcacagccccagtgggcttctttctcctctgttagtgtggttaatgttcatctgcctgcatccctgagtcacccaagtgtaacctcagccataacacgtactgcagccggaacggtgtccgcagctcagcgtccctctcccatgcactttctgaactttggtcttttaaccaggtttaccagccgctttctgcctctttgtgcttttgagggttttttggtttgtttgttctgttttgtttttaaataaagatgattatttggcccaggctgagggtgcaaacagaactcttcacgtgtccacgacaagaaaaatagtttttacaaacttctagttgtggcatcaaaagtgtgagtttttgcacctgcaaaattgtaatgcaagccctgactgggtggaagctgaagtcttgctgttttaaattaaataaataaattatttttctcct

SEQ ID NO: 686 - DNA, 495 bp, Human
  unsure 28: unknown base
  unsure 31: unknown base
  unsure 32: unknown base
  unsure 34: unknown base
  unsure 36: unknown base
  unsure 49: unknown base
  unsure 67: unknown base
  unsure 78: unknown base
  unsure 86: unknown base
  unsure 98: unknown base
  unsure 105: unknown base
  unsure 336: unknown base
gctgttcttttttcgatcggggagacanacnnananccaaggccacaantaaggctatggctctgantctagaagacnaccttccnagatgcctggcnaaaccanctccctgtgccacacagacacactaggcctgtgtatttatttccccttcaaagcagactgaggagggaggagacgaggttctcttggcatcactttctccctggctgcagaactagacacccttgaagatttggcctgggccagtgagactgaaatcaagaaaaacagaagggatgtgcagggtgggggggtccacttcctgctcccatgtcaacccccagggcctccagngtgcagacgcgtgtcctactcatctgctcccacggatgaccctggtcttcaatggttagcagaagggagaaaagaaagcaggaaaatgtgctattgagattccagtggtgacttcactgatatttagtgaatatttgatttagccaacatgcctttctt

SEQ ID NO: 687 - DNA, 3710 bp, Human
ggctgctgctgggcttgcgattgccgctcgctccagctgagctaagtgtagcagcagcaccagggcagggactgactccagcccttggactcaggacatcgcagaccttcccttgcgtgcgtgactcattcgcacatccatttctgtttatgcctggggtggggagaaaaatcccaaaccagctgtgtaaatgagtatggaagattatgatttcctgttcaaaattgttttaattggcaacgctggtgtggggaagacgtgcctcgtccgaagattcactcagggtcttttccccccaggtcaaggagccacaattggagttgattttatgattaagacagtggagattaatggtgaaaaagtaaagctacagatctgggacacagcaggtcaagagagatttcggtccattacccagagttactaccgaagcgccaatgccttgatcctcacctatgacattacctgtgaggaatccttccgttgccttcctgagtggctgcgggagatagaacaatatgccagcaacaaggtcatcactgtgttggcaacaagattgacctggctgaaaggagagaggtttcccagcagcgagctgaagaattctcagaagctcaggacatgtattatctggagacctcagccaaggaatctgataatgtggagaaactcttccttgacttagcatgccgactcatcagtgaagccagacagaacacacttgtgaacaatgtatcctcacccttacctggagaagggaaaagcatcagctatttgacttgttgtaatttcaactaaaggctgaggcacggagaagaaaaggaatcagcaactgccctgatgggccatgagatgctggggagatctggcgatgactgtggctcccgctctctgaccttctgactcctgtgggctcctgagcttacaaagcatggcaggccaagggcctcgaccacaggccagcattagcagaacatataatggtttcacccttttccagtctggagttggagcaaggagaaaattgcactaggcactccatgatctgcagagcatgttgcttttgtttttttaaaaagcaagtaaaagcgcattcctaaacagagtccggggggaaatgtactgtagggatccctcctgcacatcagtgggtgcatgtgggaactcttctttagggcttcggtggtaatcatctgggggccctggttttcttgtctaccagataaaccaaaactgggaaggccaagtacagtctctgtggtgcgtattgacgaccccatggagattttgaaaagtgttatttctcttgtccacaggcactttcaagaactttgggatgtaaaaatgaaatgaaacctttacccatgaccaacagtaacaatcattgttttaataatatatacaagctccataactccttttggtgctaatgattccgctatttcacagaccaaacgttttagtacattaatgtccttaaatttgttatatagaaataaaaaaatgggggaagtccatgaatcagcactctttctcaaagtctcattactacctttttaaaggtggatttttgggaaaagagaatacttttccttttatgttcccctctgaatctctaccactttcttgtctctccagccctttatgtaaatgaaaacgtttgcaaaatgaaaaaaataaacaaatggttgatgacattctaatataaaaacttagctctaacacattttgagtagtatgaggaaacagaccagatatgaccaaaatactgtggattaatggactgtagtgcagggctcctagcagagcacagtccttgatagtaggtcacatcttttacttcctggtactctccatcttggacagaccaaggcttaggattttgtagattttttagtatgataagtgagaatagcaacagatgaaaagtctcacgacccatttttatatcttcgatgataaccttagaaaaattctgctcgtggaagcagattgaactgtcatttatcccctccttcttgtaataatgttaccttcagacgcttaaccatatgttctttcttttttctttctcttttcctctctatttttctggtctctccttttcttcttccctccctccctccctccttccctcccatccttatatgcctgtgttactgcaaatctccaattcaaatggaggtgtatatgcctttacttagccaatttaaaaacaggactcaaaatgggagatgtgctgctgaatatgtgtttctttttcttcagtgccatactttgatagcttccaatttgttcactgatataaatgcaaattgggaaaataattaaacctgtatgctgttgatgctgtcagatgtttctgtagcttgctgcttagcataactgagggatgagtaatggaataaggatatgatgtgtaattccactgttgctgtagatggtgacaatctcagttctgatatgttgatgtttgaaagctatttaattgtaaagaaattagtcatgtagagacatgatgtggataaagcatttctggcatttctctagcaggttctagattgaccagtgtcttgcacatgagattatgcatattttttaaggggctgatacttttggttggcctcactgtgtttttcctgatcctgtgggaaagagaaaggcatcccagaagtttgacttgtttttcttttagaatctgtctctgcaggaaagaaaagtcattttaataaaaaccaaaataatttataataattgttgcctttccctccccatcctctccactaagccagcaactaaatgtattcagaaaacaagttaatcaaggagggcagaagaattttttttaaactgtaagaaaatgttcctaagtttagatttattacctgtcatttagggcaaaaatccagtgtccccagcacatgatgacccaactttgtctcacagttgcaagtgtgttgaaaataaatttgctttgtgaacttagaggaaatggctgtgttagattggactgatttagttgcaaaataataccttttagggtcacacttgtattattccctagggtttagccttctctatatacccttggccagactcagaaggggattaaaaagctctggtcttggcctctatcttccttgttgctcctcccagcctttccataacttacccatccacagcccatcagcaggaacacatgagaatgtgggactttgtttctttttttcttagttgtatgaattccagattaggccttatggatacttgtctactaatatatctgaagtttgaaaacaatccctgacaatattgtaggtgcaataaatattagtcaaataaacatttaagtgccaaggtggggtggtagtggttgggggagctttttttgattaaacagaaattccttcaagtagaacttgagaaaggacactaaatacagtcatcttaacccaggccagaacctaaatttattggtttgcctaacagtcttattgtcatggcaatatttgctaagatgagccttctttagataaaaatgaactctcatttagtggtggatgaaaaaagagaaattgctttatcatatagtttaatttggctcgatctactaaggccaccagggttgatgtattcctccatttttggtgtgatctttttcttcattcaataaagttattaaatatatggcaaaaaaaaaaaaaaaaaaa

SEQ ID NO: 688 - DNA, 2717 bp, Human
aaaaggaagacagaaaagccgcgggctgactgtggtggcgctcgcctgcagattgaaaagaaatgctgagaaatacataaagttttcctcttctgccttggatatttataatgggtatcgggaagtctaaaataaattcctgccctctttctctctcttggggtaaaaggcacagtgtggatacaagtccaggatatcatgagtcagattccaagaagtctgaagatctatccttgtgtaatgttgctgagcacagcaatacaacagaggggccaacaggaaagcaggagggagctcagagcgtggaagagatgtttgaagaagaagctgaagaagaggtgttcctcaaatttgtgatattgcatgcagaagatgacacagatgaagccctcagagtccagaatctgctacaagatgactttggtatcaaacccggaataatctttgctgagatgccatgtggcagacagcatttacagaatttagatgatgctgtaaatgggtctgcatggacaatcttattactgactgaaaactttttaagagatacttggtgtaatttccagttctatacgtccctaatgaactccgttaacaggcagcataaatacaactctgttatacccatgcggcccctgaacaatccccttccccgagaaaggactccctttgccctccaaaccatcaatgccttagaggaagaaagtcgtggatttcctacacaagtagaaagaatttttcaggagtctgtgtataagacacaacaaactatatggaaagagacaagaaatatggtacaaagacaatttattgcctgagatgaaacatataacatgtggctggctcttgttttgtaaaccaaatgattaatcttcacttgagaaagcagtttctaggaaatgtttaaataaaagagagtcttcaccttaaagaaacctatggagcacaagaaagataaatttctgcaggacagcctataaaattgtggtactttttgatgtttcagtaaacttgacattgtcagagtttcaaggacttttctttcacaattttcctagttcatggatatgaaaaaggaattctcaatccatattccttgtattgaaccttgaacaaaaacttgtatgacagacatttttaaaaatgtgacaacacttttattctctgaattttgatctcaaaggacacagaaaaaaaatggccccaggagatctgatcacacttcctcctgaggcacctctcatggatgttgcaataagcattcgggtactatcacccagaaatatgaattgccagaatagaacatttagcatgttaagcgttgatgcatataaaatcagaaatagatgtgagaatggtggaactttttaaaagaacccagtcaaatgtattttctgctgaaatctgcatatttggaggcatttcccaccaccgattcacagcccatttgatagtgtggtagttagggacttcgtggagtggtgttcagacgtcccctggggcttaaatctcttcatattagtcatcatttgtaactatggctttatttgcagagcttctaaaaggcgtataactgtgtgagtggccagatattcactttttagatcaaaaacctctcttatggaagctttaaaagtttccgtcacacacaattctcttctcaggaagtatttctcatttaggtcttcaaagtagcctgactgtgtgcatgtgtgtgtgtgataggttatttataaagactttggatagaaggagatgtattttattacctcctattctagagccccatgctcctaacaagccagagaggccccaaacaggattgtttctttcctccacagcccttctgcccatctgagattgagggagcatcgtccacttgagatcagggatggggtggagaatgggtcatgtcatgtaatgagaaaagccctcttcgggatcatgagacttggttctagtccaatttctgccactgaggatgaatgtaactgtgggcaaactatttaccctcctttatctgtgaaatgaaagggttgaattgatggatctctaaaggcttttgtcctctatgaggatgtgaaaaactagggaccacaaaagggaacaagcaaaaaagtttggattcgataaagtgatatgtaatagttgcagaaggctttatatatgcttataatgaaaagatattttttgtatattgacagcataatttatttttaatgctgtcattacacttaaagtcacaggaaaaaaatatacatgcttactcaggctttcttaaaaataaatttttatagagatccttgagtaaagacattttgcttaatttcttttttcttattccccacttgtatatcccctaccagtaccgggatctgcacacatctttttgcagttacctcttcatagccatgaaccaaaacgttctatgaggagcatgcaagtaagtcaagcctcctattctgttagtacttattagaggaggagatggttttcattgcatagtgacattttcttagccttaacgttctgatagtagcttactactcacttctctttttcagttttcataataagtattcatttttttgccataatgcttcctgtaaagccaattttatatactaataaaacatgaactgcccactcttcatgcctgccaaacttggggcaattgatgctaaatggtatttttaaaataaatgtttttattcttt

SEQ ID NO: 689 - DNA, 5440 bp, Human
cactactttttatttattggaacactttcttgccaccctcatggagttaaaatgctggaaaaatgcagtgtatttcagtgtctccttaatctttgctccttgaaaaaccaagatcacttgctaaaacttactgtttctagcttggactatagcagagatggattggctagagtcatcctttccaaaattttaactgcagctactgatgcctgcagactctatgcaacaaaacatttaagggtattattgagagctaatgttgaattctttaataattggggaattgagttgttagtgacccagctacatgataaaaacaaaacgatttcctctgaagctcttgatatcctcgatgaagcatgtgaagacaaggccaatcttcatgctctcattcagatgaaaccagcgttatcccaccttggagacaagggtttgcttctcctgctgagatttctctccattccaaaaggattttcctatctgaatgaaagaggttatgtagcaaaacaattggaaaagtggcacagggaatacaacttcaaatatgttgacttgattgaggaacaactcaatgaagcacttactacttaccggaagcctgttgatggtgataactatgttcgtcggagtaaccaaagattacagcgtcctcacgtctacctgcctatacacctttatggacaactagtacaccataaaacaggctgccatttgttggaagtacagaatattattacagaactctgtcgtaatgttcgtacaccagatttggataagtgggaagaaattaaaaaactgaaagcatctctttgggccttgggaaatatcggctcatcaaattggggtctcaatttgctacaggaagaaaacgtgattccagatatactaaaacttgcaaaacagtgtgaagttctttccatcagagggacctgtgtatatgtacttgggctcatagctaaaaccaaacaaggctgtgatattctaaaatgtcacaactgggatgctgtgaggcatagtcgcaaacatctgtggccagtggttccagatgatgtggaacaactctgtaatgaactttcatctatcccaagcactctaagtttgaactcggagtcaaccagctctagacataatagtgaaagtgaatctgtgccatcgagtatgttcatattggaggatgaccggtttggcagcagctctactagtacatttttccttgatatcaatgaagatacagagccaacattttatgaccgatctggacccataaaggataaaaattcattccctttctttgcttctagtaaacttgtgaagaatcgtatcttaaattcgcttactttgcctaacaaaaaacatcgtagtagcagtgatccaaaaggagggaaattatcatctgaaagtaagacaagcaacaggcgaatcagaacacttacggagcccagtgttgattttaatcatagtgatgattttacacccatatccactgtacagaaaacattacaattagagacttcatttatggggaataagcacattgaagacactggtagtacaccaagcattggagaaaatgacttaaaattcaccaagaattttggtacagagaatcacagagaaaatacaagccgagagaggttagtagtagaaagttcaacgagctcacatatgaagatacgtagccaaagtttcaatacagacactacaacaagtggcataagttcaatgagctcaagtccttcacgagagacagtaggtgtagatgctacaactatggacacagactgtggaagcatgagtactgtggtaagtactaaaactattaagacaagccactatttgacgccacagtctaaccatctgtctctctccaaatcaaattcggtgtccctggtgcctccaggttcttctcatacgcttcctagaagagcacagtcccttaaagcaccctctattgctacaattaaaagtctagcagattgtaactttagttacacaagttctagagatgcttttggctatgctacactgaaaagactacagcaacaaagaatgcatccatccttatctcactctgaagctttggcatctccagcaaaagatgtgctatttactgataccatcaccatgaaggccaacagttttgagtccagattaacaccaagcaggttcatgaaagccttaagttatgcatcattagataaagaagatttattgagtcctattaatcaaaataccctgcaacgatcttcctcagtgcggtccatggtgtccagtgccacatatgggggttcagatgattacattggtcttgctctcccggtggatataaatgatatattccaggtaaaggatattccctattttcagacaaaaaacataccaccacatgatgatcgaggtgcaagagcatttgcccatgatgcaggaggtcttccatctggaactggaggtcttgtaaaaaattcttttcacttgctacgacagcagatgagtcttacggaaataatgaattcaatccattcagatgcctctctgtttttagaaagtacagaagacactggactacaggaacatacagatgataactgcctttattgtgtctgtattgaaattctgggtttccagcccagcaaccaactgagtgcaatatgtagtcattcagactttcaagatattccatattctgattggtgtgagcagactatccataatcctttagaagtggttccctctaagttttcggggatttctggatgcagtgatggggtgtctcaagaaggctcagctagcagcaccaaaagcacagaattgttactaggtgttaaaacaattccagatgatacaccaatgtgccgtatactccttcgcaaagaagttctaagattagtcattaatttgagtagttcagtttcaactaaatgtcatgagactgggcttttaacaattaaggagaagtatcctcaaacatttgatgacatatgcctttactctgaggtttcccatttgctgtcacactgcacattcagacttccgtgtcggaggttcatacaagaattatttcaagatgtacagtttctacaaatgcatgaagaagcagaggctgtgttggcaacaccaccaaagcgacctatagttgatacatctgctgaatcctgacctcatatttatgatggatatagatacatactatatatattcatatttgtggatttcctaaaagcctcagaaaatacgactgactaggcagcaaagacaggagtatcttctgtacactgttccgcagttactggtacatgaacagttggaactgctgactttcctaaccaaaacaacttccttctctcctttgttgagccttttgaggggttcatgattcattaccacagttttaagagtttcagttaccattgtatgcaagagccaagcactgaatacctacataggttttctattttctttcattttaaaagcgtaatgacagtggagcaataatgggatatgcagaagcacccttcacaagttatttctgaatgatttttagggtaaataatacagatgccttgtttgttaactaacttgtggaaagcaggaatcagtgtctctaaggctgcatcctattaccacaatggggtgtgctataactgctggtattagagagggaactttggccctttcacgtttttcttaatgtttgtaacactacttcagaggtttataacctcaaagcagaagaagagcctcaacaacccgggacttataagttatttttatgttactagacttgcataaagattcttgttttccaactcttcattttgttgcaatgtgttattacaggatatatgaaccaattaaggtttttcactacagttcttgaataaaatttaaaaatcattttttattttaattaaaaatatttcccatttatagaatgcatatatttgcaatggacttccactttcatcaactttccatctcatcgctttaaacaggaacttgaacaagcactgttagtttagacctaaaggataggaaagcattaaataatactttggatctcctgaggaaaagataagtttgcttgcaatttacacattccatggggaaagaagagccatatttccttaaaaaaaaattaataaagcttgttattgagaaaaattgtagtgaaaagccttaagtaccaaattttaaagcagcagtaacttaatttttatatcagtgtttttgttttgcacaaactaaatgcagtggtaggtgggtttatgagtatattaattgcctttatccatttgtgaagttaagttgatgagggcaaggtttttgtttgtttaatttgtatatgtctaaaggtatttggaactttttacaggaattaaacatatatgcaaatttgtatataaaaatagcatggccatcatttgaatgcttgtaaatgaaaggattatcttttttgagatctatatataaatagaaatagaaaatccagctggactgattaggattcttttttaattcatttgtgtataacatttttattacaattacacatcagttttgacacagtcatagcaacattaatattttcccatgatgcagatcctttttgtaatgggcttgttctttgagatctctgtaaagaaccctgtgaactagaaaacataactcacagagatacttttttaaaaaatttatttactggaactgaaagttccagttgggatgaagcatttcatctcacttcataacacctctttgactgcacttcagtgaattgttcttatgtgcactgtgtagcaacttacattataacaaagcagataagggctgtaagctgctgcttatgttgaaaagtggttcttcagattttctctcataaaatccagttgaagataaataatttttttatactttatcactgaacccaagtgtttatttaaatgtcaacagtacttctaagaacgttgcctgtcatcgtggtctttggtcttggataactaaactgcctttccagagaaccaaatgtcagagttactagaccaaatagtggttaaaacctccaaaggaagtaatgtaatcttattcataatgggattaacatattttagacattcattttaaacactacctcagttaatatagagtataaaaatctgtggtttaatccctcaaaagttaacagtaattttttttttgtcttacacacacacacaccccctcccccaccatcactatccctgtaccctcaccttggtcatctatcctgaaataaggcttagttagtattggcctgaatgttttgtgttttttttttgtttttttttttttactgttactttgaaaaatatgtatgtataccttatcatatctgcctatatcacttactttggggagatactcagagctttgtggttatcagtatactaaaaaaaaaaaaaaa

SEQ ID NO: 690 - DNA, 1121 bp, Human
atgaatgtcaaaggaaaagtaattctgtcaatgctggttgtctcaactgtgatcattgtgttttgggaatttatcaacagcacagaaggctctttcttgtggatatatcactcaaaaaacccagaagttgatgacagcagtgctcagaagggctggtggtttctgagctggtttaacaatgggatccacaattatcaacaaggggaagaagacatagacaaagaaaaaggaagagaggagaccaaaggaaggaaaatgacacaacagagcttcggctatgggactggtttaatccaaacttgaaggaatccgaataactaaactggactctggttttctgactcagtccttctagaagacctggactgagagatcatgcggttaaggagtgtgtaacaggcggaccacctgttgggactgcgagattctcaaggggaaggactgggtctcatttctcccatctcagcgcttagcaggatgacctggtatagagcagggaactgggaaatgtgggtcaggggatcagacactccagttgggtcttttatataaattaaatggcaaaaggctccatacccttcttcttctttcctaccctccactttatctgcaaaatgggaatgatgataacacccacttcatagaatggtcatgaagatcaaatgagagaataaaagtcaagcacttagcctctggtgcacaataagtattaaataagtatacctattcctccttttccttttttaaaaataatattaccaaatgtccagcttatacacatttacaagacttagctagtgggctatgttagagctactaaaagatctttgacaagctaaaactaagatgcaatgaatgaggtgtaacgaacaagagagttttaagttcagaaatggttacagaagtataagacagctgtgtgggtgttttttggtttttggtttctggtttacaatctcgtcattcaacaaagatgggagttttatagaactaaaagcaccatgtaagctactaaaaacaacaacaaaaaaggctcatcatttctcagtctgaattgacaaaaatgccaatgcaaataaaaatgattactttttattttaaaaaaaaaaaaaaaaaaaaaa

SEQ ID NO: 691 - DNA, 3095 bp, Human
agcggagttacttgggcggggccggtagcggcgggagctgcactggccagggttccggctgtatatccatgagcgccgctggcagccggggagctgcaggaaccagactgggggcgagctgagcacctgtagtcaatcacacgcagcttttaggtttgtttgaataagagatctgacctgaccggcccaactgtacaactcttcaaggaaaattcgtatttgcagtgggaagaataagtaacattgatcaagatgaatgccatgctggagactcccgaactcccagccgtgtttgatggagtgaagctggctgcagtggctgctgtgctgtacgtgatcgtccggtgtttgaacctgaagagccccacagccccacctgacctctacttccaggactcggggctctcacgctttctgctcaagtcctgtcctcttctgaccaaagaatacattccaccgttgatctgggggaaaagtggacacatccagacagccttgtatgggaagatgggaagggtgaggtcgccacatccttatgggcaccggaagttcatcactatgtctgatggagccacttctacattcgacctcttcgagcccttggctgagcactgtgttggagatgatatcaccatggtcatctgccctggaattgccaatcacagcgagaagcaatacatccgcactttcgttgactacgcccagaaaaatggctatcggtgcgccgtgctgaaccacctgggtgccctgcccaacattgaattgacctcgccacgcatgttcacctatggctgcacgtgggaatttggagccatggtgaactacatcaagaagacatatcccctgacccagctggtcgtcgtgggcttcagcctgggtggtaacattgtgtgcaaatacttgggggagactcaggcaaaccaagagaaggtcctgtgctgcgtcagcgtgtgccaggggtacagtgcactgagggcccaggaaaccttcatgcaatgggatcagtgccggcggttctacaacttcctcatggctgacaacatgaagaagatcatcctctcgcacaggcaagctctttttggagaccatgttaagaaaccccagagcctggaagacacggacttgagccggctctacacagcaacatccctgatgcagattgatgacaatgtgatgaggaagtttcacggctataactccctgaaggaatactatgaggaagaaagttgcatgcggtacctgcacaggatttatgttcctctcatgctggttaatgcagctgacgatccgttggtgcatgaaagtcttctaaccattccaaaatctctttcagagaaacgagagaacgtcatgtttgtgctgcctctgcatgggggccacttgggcttctttgagggctctgtgctgttccccgagcccctgacatggatggataagctggtggtggagtacgccaacgccatttgccaatgggagcgtaacaagttgcagtgctctgacacggagcaggtggaggccgacctggagtgaggcctccggactctggcacgctccagcagccctcctctggaagctgcgtcccctcaccccctgtttcaggtctcccatctccctcagtgacctggatctgacctcacaccatcagcagggggcacccaccatgcacacctgtctcggagtaggcagctcttcctgggagctccaggctatttttgtgcttagttactggttttctccattgcattgttaggcatggtgacaagtgacagagttcttgccctctgtccagtttcagcatctggttgcttttaagccaagtacatctagtttccctattaaaaatgtgtctgaatagcgattttgctttgccaccaaaaggcttttccctgagaacagtgaaggatgtatgtcattttgtggtggtgtatgtgtccttacatagaccttaaaaagagctcacccttccaggccaatgctgaagacacagctccgcttgggagcctgagaacccaggcttcccaggccagagtgtggcttcttaaacggcaaaggraattcctttgagtcacaagccaagttttcgccctgtctcctgagaccatttccctacgctttgctgctgctgagagttacctgaggcacttgttaaaaattcagcctcccaggtccctcccctcggagaggctgattcactgggtctgggaaggagcctggggattttaatttttcacaagtgccccagatgattctcatcaccaagcaaattttggaaatgctgttcaacagcgcccttaaattggaaacatctttgcagctcgttttattgaaattcataatcaggggtgtcctctagctcccacggtctccagagcagcaaggccggctatggagctgccgtcgtgtgaccacagtgtgatgtctcagaagggctctgggtgggctgagcatctgggctgtgcctggctctgcttttcaccctggacaaagtcgctgtggacttcaatttcttcacctctaaaatgggggacttggaccaggtagattgctgagctcactaccaggttcaaagttcaatgacaaactcagtttactgaggtttgagagaacatccctccaggggagcctgggagctgctctcccagtctaagcatgtagatatcatcgtttgccttttgtgtgtgtgtgtcccttatttgataaaaagatgttttgagttgtttttttttttaagcactcacttgtaattttagtttttaaacccaagtccctctaactttgcctttgataccaaacaattcaaaagttggatctgagtttggagaaagatatttccaacctaagtgggtattattttgaaaccagatttttaatttaatagcctatatttgtagtctgttggataggtgtttccaaagtgtgtcttctcaagtgaaaacgcaactctaggtttcaagtactccttttctccgatcctgtggtacttgaatatccaaaaaccctgcactttgaacaatcagctgttgctatctggaactaaacagaactatgagtaaaattgcctggatactttaaaaaaaaaaaaaaaaaaaaaaaaa

SEQ ID NO: 692 - DNA, 543 bp, Human
  unsure 152: unknown base
aaaagcaagcatctacaattttttttgataaagactttttatgccaggaatggattaattaccaacaaaatttatactaatcaggctgatgtcaatctatttttgtaatgtatcattaacaaatttattttggaaaagataaaaatattgcnccttgataataaatctttttttcctttgatgcaaacagctagaacacctttttctttttctttttgatattctaagacaaaaaaatggttaatcttcagattaataaattaggtcattataataataaattaattttttttaaagttcagcaacctctgtccaagtatttacaacaatacttgaaagttcctttacaaaacagaacacattttcttttcacgttaagcatactgggtatctgtgtctttcacaacaagcatttttaaaagaaaactcaatgcacaaatgggttaattagtataaaagtgctaagggctgtttgaaaagttaccactatagtatacagtcagttatatttgaggcatactacaacaaacttccagcttattg

SEQ ID NO: 693 - DNA, 2306 bp, Human
gtgccacagcgaacgaatgacctgaagatccttccaggtcaagctgtctgtcctaatcccgggtggcgaggaatatagcactaatccgtggtccacgttattcgggacatcacagtgcttttggctgcccgtattcagacatgaacttgaaaaaggaggcaacacttcacgatcgtttgagagaacaaacacaggcaaatttggaatcagactcttcacattcaaaatcaaaaagcctctgtagtttgaacttcaatggaaaacatgaaaaggtgaacagtcagcccagacttgtacagcaggcaaagtgtttgaaaatcaaaggaaaagaagatattgacttggataatctcttcagagtgcttgtgctgcatcccagaggtttggaatactcggtggagcaggcgcagcaggtgcttcaccagtcagtgtccatgtccacggtgtcagcccacccttttcgggaccttcccctcggcagggagcaacactgcaagttgcttccaggcgtggctgacatccgggccagccaagtggcacgttggactgtggatgaggtggctgagtttgtacagtctcttctgggctgtgaagagcatgccaagtgctttaagaaagagcagatcgatggcaaagccttcctgcttctgacacagacggacattgtcaaagtgatgaagatcaaactgggcccagcactgaagatttacaactctatcctgatgttcaggcattcccaggaactccctgaagaagatattgcctcagaccaagaagtcaggggatgaatgggctccctgaacttcctctggcaccaagacctgcgctctttcagcaataaaagtggagcacattaatttggtgtgaatgtccccatggccgtatccacactgaatctggactttttaaagtgtctgtgatttgtttacatgtttagaggattttgatgactggtccagtgccaatgactcagaggcttaggcccatctgtgggtttggtttacgaacattgttatctttggtgggatccgctcagctctgatttgtttgcaagacagaccaaagaagcccacacatccacctttattcttctccgtcaccagaaaagaaaccattttccatcttacaagcataacactctcaagtggtgaaatattagaaaagcagtgttcatgaatacatcgttaatgtttttaccagagcaacatcgagcttggctcagatctgccatggagcacagctagtctaagagctagaggcctggtgctttcaaaagacttcatgtgagatttttgtgtactttactcaggaaagtgtgaatctctaaaaaataataataataagcacatgttttcatgattcattaattctcctttttgttccattaaccatttcttggttgtgctcccaagctttcctggagcctccacaaaggagagtagccaggagtaacgagaggacggtcaggtgggcacttccaaaagctggagagacccttctgagggaccctccaccatcagcggggcctcaggggaccctgtcctaacactggtgtggctgctgggccagacgctcacctgcacagaactcctccctgctcccactctgaagggcgtttcagaattgactcatttccactgcagtctgccagaacccctgtaataaggagctgtgttatattacatctggggctgtgtgcatctttacaaatggagacacactattcaaagggaagatctctaaagtagggagcgtggtacttattctttgtttgaaacattccgatttgttgtcaggccttatttgttttttgtaagtgattgtatcggaggcttaagttgtgtggaatcagtcccacagtgttgaaagacaagtacctcttttctgacacttcttactacttttacaggtagtaacagctacaaatactctcccagaagtggagggacacccatttgtgggtggggagaaagagggagaggttctatgtccacttgcttcattaagaatgttaaggtttaggaaagttgattctgcttggagaatttctcaagctttacatttttttttcactgaagaaaataaacaaactctaagaggtgtgcatatataacatttctttagatctttacctaaatggaattttaatatattattggttgatgtaaattttgtttctgtggagttttgtttgttgttttgctttttgtagactgccatgtgcaagtaaaattcctgcttctgccatgttaaaattttaatatattttaaatgataataaacagagaaaacaaaatttatacctc

SEQ ID NO: 694 - DNA, 4287 bp, Human
ggctggtcaggaaaccaaggagacccccccccccaaccatggacccaccgtcgccaagccggacctcccaaacccagcccacagccacctctccgctgacttcctaccgctggcacacagggggcggtggggagaaggcggctggagggttccgctggggccgctttgctggctggggcagggccctgagccaccaggagcccatggtcagcacccagccagcccctcgctcgatattccgtcgggtcctatctgcgcctcccaaggagtcacggaccagtcgccttcgactctccaaggccctctgggggaggcataagaacccaccgccggagccagacccggagccggagcaggaggccccagagctggagccggagccagagctggagccccctaccccacagatccctgaggcccccacacccaacgtgcctgtctgggacattgggggcttcaccctgcttgatgggaagctggtgctgcttggaggagaggaggagggtcctcgaaggccccgggtgggaagtgctagctccgagggcagcatccacgtggccatggggaacttcagggatccagatcggatgcctggaaaaacagaaccggagactgctggtcccaaccaggtccacaacgttcgggggttgctcaagaggctgaaagagaagaaaaaggccaggttggagccccgggatggaccccccagtgctctgggctctagggagtcgctggccacactctctgaactggacctgggtgccgagcgggatgtgcggatctggccactgcaccccagcctcctgggggagccccactgctttcaggtaacctggacgggtggaagccgctgcttctcttgtcgctcggccgctgagagagaccgctggatcgaggaccttcgtcgccaattccagcccacccaggtcattgccctcagaaaagcgggacacggagaccccgcccacaggcctggcccgccccttccactctacccaaagccagctcgctccataacccgcgcccccaacacacctgccccgcctgcatcgttgcaacggctccaagactccccttccatctattaccagccccgggaatatcagacccgccccttctgtccactcccggccccatatgcacccaaagccctgcctgccaggcaatcgcgaagtctttactccagtactactcttgtatgccctggagcccccaactctcccggagagcccagaaaagctagaagacttccgcgtaaccgcctccggactcccgtggctccacttctttccccaaaggcccagcaatctccctagggacccgacgcaacaggtttgaggctccacgcttcacttgcggtgccttctttggggtgccaacaaaccaaaacgcttccccccatcccactcccatctgcaggacaacgtggagcgggaagagacatggctgagcgtgtgggtgcacgaagcgaaggggcttccccgagcagcggcgggggcacccggcgtgcgcgccgagctgtggctggatggcgcgctgctggcacgcacggcgcctcgggccggcccaggccagctcttctgggccgagcgcttccacttcgaggcgctgccaccggcacgtcgcctgtcgctgcggctgcgcggcttgggcccgggaagcgcggtgctgggccgcgtggccctggcgctggaggagctggacgccccacgcgcgcctgccgccggtctggagcgctggttcccgctgctcggggcgccggcgggcgcagcgctgcgggcgcggattcgggcgcgtcgcctgcgcgtgctgccgtccgagcgctacaaggagctggcggagttcctcaccttccactatgcgcgcctctgcggggccctggagcccgcgctgcctgcgcaggccaaggaggagctggcggcagccatggtgcgcgtgctgcgggccaccggccgggcgcaggcgctggtgactgacctgggcactgcggagctggcgcgctgtggaggccgtgaggcgctgctgttccgggaaaacacattggccaccaaggctatcgatgagtacatgaagctcgtggcacaggattacctccaggagaccctgggacaggttgtgcggcgtctctgtgcttctactgaggactgtgaagtggaccccagcaaatgtccagcctcggagctgccagagcaccaggccagacttcggaacagctgcgaggaggtcttcgaaaccattatccattcctacgactggttccctgcggagctgggcatcgtgttctcaagctggcgagaagcatgtaaagaacgtggctctgaggtgctgggcccccgactggtgtgcgcctccctcttcctgcggctcctgtgccctgccatcctggcacccagcctctttggtttggcaccagaccatccagcacccggcccagcccgcaccctcacactgattgccaaggtcatccagaacctcgccaaccgtgccccgttcggtgagaaggaggcctacatgggcttcatgaatagcttcctggaggaacatggaccagccatgcaatgcttcctggaccaggtagccatggtggatgtggatgctgcccccagtggttaccagggcagtggtgatctggccctccagttagctgtcctgcatgcccagctctgtacaatttttgctgagcttgaccagacaacccgagacaccctggaaccactgcccaccatcctgcgagccattgaggagggccagcctgtgcttgtgtcagtgccaatgcgtctcccactgcccccggcccaggtccactccagcctctccgcaggggagaagcccggcttcctggccccccgggacctccccaagcacacccctctcatctccaagagccagtctctgcgcagcgttcgccgctcagagagttgggcccggccacggccggacgaagagcggcccctgcggcggccccggccggtgcagcgcacgcagagtgtcccggtccggcgtcctgcccgccgccgccaatctgcggggccctggccgcgacccaaaggctccctgagcatgggaccagcgccccgcgcccggccttggacccgggactccgcctcgctgcctcggaagccgtcggtaccctggcagcgccaaatggaccagccgcaagaccgaaaccaggcactgggcacgcaccgacctgtgaacaagttggcagagctgcagtgcgaggtggccgctctgcgtgaggagcagaaagtgctgtcccgcctcgtggagtcgctgagcacccaaatccgggccttgacggagcagcaggagcagctgcggggccagctgcaggatctggactccaggctccgtgctgggtgagcccagccctctccattagctccgcccccaggtgggcccgatccaattagatctgaccaggccctcccccccccccccccaaaccacgcctagcacggccaagccccaccctggccccgccccaataagtctgtccaggccctgcctcttggcaagccccgcccccaggtggacccacccaacgaaggtcggcctaggaccctggcagattctctcatccaggccccacccctccatcagcccctcccaacctggctgggccgggcactgagatatctcagcctgggcactccctccagctcagtcacgaccccacccaggactggccaaaccccacctccaagggatgattgataggtcctgtcattccaatcattcccgtctctggtccgacccttcttcaagcatatttaggcccccgcccctcagtctggacaagctccgcctccactccaagctccgcccccggagtccctggcactcccaccaggagctggaagggacttccttagcctctgcccttcgccccaatcccccgacccccacaggagctcagagtttgattcagagcacaacctaacaagcaatgaagggcacagtctgaaaaacctggagcaccgcctaaatgagatggagagaactcaggctcagctgagggatgctgtccagagcctgcagctttctccaaggacgcgggggtcttggagtcaaccccagcccctcaaagcaccctgcctcaatggagacaccacctgagctgcccatcctgcctcatcacacgtggtctgggagcagagagatagccatcttagggggggtgtctgactttgccttagccctacttggcctacagtggggagtggagctgctggtcccaaccactctggcagtatgaagttgcccagtaaaatcttgatttcagtg

SEQ ID NO: 695 - protein, 478 aa, Human
MVRVLRATGRAQALVTDLGTAELARCGGREALLFRENTLATKAIDEYMKLVAQDYLQETLGQVVRRLCASTEDCEVDPSKCPASELPEHQARLRNSCEEVFETIIHSYDWFPAELGIVFSSWREACKERGSEVLGPRLVCASLFLRLLCPAILAPSLFGLAPDHPAPGPARTLTLIAKVIQNLANRAPFGEKEAYMGFMNSFLEEHGPAMQCFLDQVAMVDVDAAPSGYQGSGDLALQLAVLHAQLCTIFAELDQTTRDTLEPLPTILRAIEEGQPVLVSVPMRLPLPPAQVHSSLSAGEKPGFLAPRDLPKHTPLISKSQSLRSVRRSESWARPRPDEERPLRRPRPVQRTQSVPVRRPARRRQSAGPWPRPKGSLSMGPAPRARPWTRDSASLPRKPSVPWQRQMDQPQDRNQALGTHRPVNKLAELQCEVAALREEQKVLSRLVESLSTQIRALTEQQEQLRGQLQDLDSRLRAG

SEQ ID NO: 696 - DNA, 6834 bp, Human
  unsure 2293: unknown base
  unsure 2294: unknown base
  unsure 2295: unknown base
  unsure 2296: unknown base
  unsure 2297: unknown base
  unsure 2298: unknown base
  unsure 2299: unknown base
  unsure 2300: unknown base
  unsure 2301: unknown base
  unsure 2302: unknown base
  unsure 2303: unknown base
  unsure 2304: unknown base
  unsure 2305: unknown base
  unsure 2306: unknown base
  unsure 2307: unknown base
  unsure 2308: unknown base
  unsure 2309: unknown base
  unsure 2310: unknown base
  unsure 2311: unknown base
  unsure 2312: unknown base
  unsure 2313: unknown base
  unsure 2314: unknown base
  unsure 2315: unknown base
  unsure 2316: unknown base
  unsure 2317: unknown base
  unsure 2318: unknown base
  unsure 2319: unknown base
  unsure 2320: unknown base
  unsure 2321: unknown base
  unsure 2322: unknown base
  unsure 2323: unknown base
  unsure 2324: unknown base
  unsure 2325: unknown base
gtctgctttagtaaatgcgttaactaggctttaaatgacgccgcttataaattaccgcttccttcgcgccgccgccaacgccgagccccgaggaccgcaagcccagaggacaagctgcgccaagagggagtgcggagcgttcacccagcgggtcagagagcgagcgggcaggcagcccccggccggcggaacccggcacagccgagcagagcgcgggcggcgccgcagccaccccagatccagaaccagaaccacagcccttctgaggagctcccaaacaaagcaaggagatggccaccaaggagaagctgcagtgtctgaaagatttccacaaggacatcctgaagccctcaccagggaagagcccaggcacgcggcctgaggacgaggctgagggaaaacctccgcagagggagaagtggtctagcaagatcgactttgtgctctctgtggctggcggcttcgtgggcttgggcaacgtctggcgcttcccgtacctctgctacaagaatggtggaggtgcgtttctcataccgtattttattttcctgtttgggagcggcctgcctgtgtttttcttggagatcatcataggccagtacacctctgaagggggcatcacctgctgggaaaagatctgccccttgttctctggtatcggctatgcctccgttgtaattgtgtccctcctgaatgtctactacatcgtcatcctggcctgggccacatactacctgttccagtccttccagaaggagctgccctgggcacactgcaaccacagctggaacacacctcactgcatggaggacaccatgcgcaagaacaagagtgtctggatcaccatcagctccaccaacttcacctcccctgtcatcgagttctgggagcgcaacgtgctgagcttgtcccctggaatcgaccacccaggctctctgaaatgggacctcgctctctgccttcttttagtctggctagtgtgtttcttctgcatctggaagggcgtcaggtccactgggaaggtcgtctacttcacagccacttttccattcgccatgctcctggtgctgctggtccgagggctgacgctgccgggcgcgggccgaggcatcaagttctatctgtatcctgacatcacccgccttgaggacccacaggtgtggattgacgctgggactcagatattcttctcttatgccatctgcctgggggctatgacctcgctggggagctacaacaagtacaagtataactcgtacagggactgtatgctgctgggatgcctgaacagtggtaccagttttgtgtctggcttcgcaattttttccatcctgggcttcatggcacaagagcaaggggtggacattgctgatgtggctgagtcaggtcctggcctggccttcattgcctacccaaaagctgtgacaatgatgccgctgcccacattttggtccattcttttttttattatgcttctcttgcttggactggatagccagtttgttgaagttgaaggacagatcacatccttggttgatctttacccatccttcctaaggaagggttatcgtcgggaaatcttcatcgccttcgtgtgtagcatcagctacctgctggggctgacgatggtgacggagggtggcatgtatgtgtttcagctctttgactactatgcagctagcggtgtatgccttttgtgggttgcattctttgaatgttttgttattgcctggatatatggaggtgataacctttatgatggtattgaggacatgattggctatcggcccgggccctggatgaagtacagctgggctgtgatcactccagttctctgtgttggatgtttcatcttctcgctcgtcaagtacgtacccctgacctacaacaaaacatacgtgtaccccaactgggccattgggctgggctggagcctggccctttcctccatgctctgcgttcccttggtcatcgtcatccgcctctgccagactgaggggccgttccttgtgagagtcaagtacctgctgaccccaagggaacccaaccgctgggctgtggagcgcgagggagccacaccttacaactctcgcaccgtcatgaacggcgctctcgtgaaaccgacccacatcattgtggagaccatgatgtgagctctctcgggtcgacggggccggcggctttcctgctgtttactaacattagattctcataggaccaggtttacagagctttatatttgcactaggatttttttttttttgtaattgtcacagaaaatgtaattgtgggnnnnnnnnnnnnnnnnnnnnnnnnnnnnnnnnncgtgtgtgtgtgttttgttttgatttgggggatattttgtacaaaaagaaaacccacgggaagatgtccgtggagaggcagagctttcatactgaattagatgtattttatgggaatttggtacatttctctagtgtatttattttattacatataagtatatatacacttagagattgtcatatacttttaccacttgaattgatcttcttgccagcaatagatctcattttcaaaagcaattcttcggtgctgtgtagctggcagaaagttctgtccagtaaacgcaggatggaattttcctgggactctacacccatcttaaggtggtataccttccaaatcctggttcagatggaagaaatagcaggagagaggacccattagctggcagacccagggggaagaaaggagggctgtgaggagatacctcattaaacttggcttagtgaagaagagagatgccaaaggaatgaaccaacccttcacataaaggagactggctgaagctgaatgaggaggccctatagcagaagtctgattctaagagcagtagaaacttgtaccagaagcaaaatcccacttttaattttgagatggtgagtggatagtcagtagaccgtcagaaccactggccagagagggagctgctagagatccaagaaggctggcaggaatgaggctcacaactcagcctcgcaagaggtggcagaggcacaggaggccacagtccttcctggggcattccaggcagagaaggagcagaggctctcccggcaggagctggggtctcagggctcagatgagtctgttgcatttgaatggggtcatagcaggttctggtcattccccaagcaacatctcagcatctcttaaagttgcctgcaggaatgaagcatgacatacctgttgagggactaggggagtggtggggaggtgagtggaccaaaggatataggccccaggcatgcagatgggcccggtgtcggggaggggtgctttctttcctcatctccccactccccactctcagcctgggagactcctgccaagccctcattaaagatgccaccctgggctgccctggcacctagcaaggcacaccaagaacagcttttgagtctgtatcctccactgggggaagtgctcccagttcagaacaagggcagcccgtggtgctgacctaggatataacaaagctcttcacttcaaaacccctgcaatagctgggtttacagacatttaccacctggggacccaaaagagaaggcctaggagagttttctagaaggttgggattgtcagggtcctggccccccagaactggcttgatcaagggccttatgtggagcagaggttgtctctgaaccaggagagaaggtactatacctttcaaatccccagggcagacacacccccacccagcccctatttggacctaaactgtgccatttgaacagtcacttccaagctcagtctaaatgaaaccgaaacgtgaccacgcacaaaggcagtcactgcctcgaggggtgcagaccgcagaattttcacagcaggggctcttggaactctggaaacccccttcttaaatttgggaggaggagtatgcctttggtgtccccctcccaaggggcaattctgaaccccatctttggcaggcatacatatttcactgtttccaaagctatctactctgccaaacaacacccagtcctattccaaactctcaacgattctatcttgttcctgtttttctatgtatttatggttgccgtttgtgtctgatttgattttactgttttttccctgattttatggagtagcattgtgacctgttttcctttgtcttatataactttagtaaactaaccactgtcaatgattgagggcaggtggcacgtggggaagaggggacttggcacgcagtggctacctgggcatttgtggtcatttcagtttccatctccccagcgggggctccctgggtgaaaggccacagtattttgggttggtaggcaaattgcaacattctggacatggcctgaggaaggcctcttcttataagattctcagaccaaattctagaccaaagacacaggcagaccaagtccccaggccccgcctggaaggaagtcgttcctcaactctccccaaggcacctgtctccaatcagagccctctcgcccagccagccctggctctgtgtgcagagcatagctctgcgagtacctgtgtaataatgctcaaccttcatgtctccgtataaacgaaactttccatgagagctcatgactctggtccacctgtctatagagaatgggcaaagtccttcacctgctttctgcttgggatgggtcagaaatgctgatgcccgcacatagcccagccagccagatctggaaaggaagcgagggggttgtttaaatcaattttttaagatgaagaagtgggagacactgcgttgagatgggccatgctagggccacagagatttcctgacggtcagggagagaagggcctccagggtcccctaacccaacgcccttgttgtaaatgaggtaactgaggctcagggaggcactgtgagccaggaatggattttcttgaaacagctctagctgcaggttctccgaggtaggtgcagggaatggtgagtgtctaaccagggctacatccagcaacatcctcaaggtcttcctgacaaccaaagacaagcctttatggaaaaggaaatgcgctcccctccatgttcagggatgaggggagcagcagcagccacactcccaccatcctcacagaattcctggacccatgcggtggctccgtgagctgggtgactccagcctcacctgcacaccccagccctgcacggggccctccttcctcccagcagcccttggtgagctaggaattgagatccctgtttgtgaaagagggaactgaggtgcagagaagccagaggtgtgccagatccttaggcaggatttagatgaagtcgccctggctccagactgaccccgaggctctgcggggagtttccaggcagcaggaagtggccttggatgctctccttccaggacagcataacccctgggccatgtgcagctccttcactgccccctggatccccagcatacccccaaagacagtggggaaacacaaggggagagcacagcatggcccctccagcccacttcagggcactcttgtatcacccgggtaccgccacactggtcccccacccagccagcatctcccagcacagcccctctccctggggaaatgctctgggtagccagtctaaaggcagaggcacctaactgctccccgcagcccaccccacccaagattcagacacaagccaggaaaggacccaagagaaaatccttcaaggtggcctgaggtcccatccctccctcagacccatgtggtcccaggccaggctgcctgggacacggtaaataccactgtgtgcaaaaatcgaagtacaaaaccacaagactaaacaaaacaaacccagagagccaaacttgtagaggtgggcagtccagaaagcagggggcagccctccccctttccttctctccctgatcctcagaatatatattgttgtaataggaagcatttttgcattgttctcttgtgggtgtcactacagacatgttctggcgtgttctccgagggatggagcatcctgttatatatttgacttcaaattgagatgttggcttcatttttttttttttacccaattaatctcccaatccctagcaactgtgactctgtatttagcacaagagaaagctgagaatgtgggtcttgcctccttccagaaatatgtctggctcatcaggacatttttttaaaacttcaaaatatttttaagatattttaaacttttataaaaaaaaaatcaaccaacaagagacttttctgaggaggaacatttgtatttgaacaagatccttggtgtgtagttcagtcttgcagtatacaagcttttgtgtataaatgttttatgatatgattccctgtattttgcaggggtttttttctcttttgctttttagataaatatgtatatcaatattttaaattcatctttgctttttttagaggagtttgtaatcaccttataacatgaaaataaacatttcctttttaacatccaacatgtgtgggttgtgttctggtgaggtatttccccctcaacgtttgccaaacgctttacattttataaagggcttcccgtccaatcccaggacgctcctcaaaggtaggtattttcccaggttagaggttcccacatggaggctcacagaggaagcagcttgctcactcaggggtacacagcaagtccatgaaagaacctggattcgcacccgggcccatgagctcttggctctactggctctactgattctacctgctacatgcccagccctgtacagctgggagatctggcagcagtcacctgagcctcagtttccccatctggacacgagccga

SEQ ID NO: 697 - DNA, 1640 bp, Human
  unsure 288: unknown base
  unsure 337: unknown base
  unsure 342: unknown base
  unsure 345: unknown base
  unsure 347: unknown base
  unsure 348: unknown base
  unsure 352: unknown base
ttctagtgtttattattcacaattgtaaattattcttccaattctttgtgaggcctccacggatgaattttttctcctaaaaatcgtcctgtctttaagactctgtgtgtgatggtagagaataaatttctcatctgcagttgatctgagaaaaaatgtttatcctgcctccttgcttggtttatgtgaaaaaagtgtaataaaataatatgggttattttcggaaagattttatgtaaaaaagaaaaaaaaaatatgggcgattccagtattaattataaaccttanatgagagaattatttcagtgacatagcaagaataagttagtgtcttttnacttngtnanngatngagttagactaaggagtagtgatagacatttatagagaatgacttaacacttcagaaagatcactttgattagatgtcctttagtatttggtattcggtttatattattatacaatcttgtcctctttttttaagcaaccaggttttcctgtgactgtgacagtagagagtccttcatcctctgaagttgaagaggttgatgattcttcagagagtgttcatgaagtgcctgagaaaactagtatagaacaagaagcattacagctggaacatgaaaatgcccagttaagaaatataaatttctctttgtctgaagcccttcatgcacagtcattgacaaatatgatcctggatgatgaaggtgttttgggcagcattgagaattcttttcagaagtttcatgctttcttggatctccttaaagatgctgggcttgggcagcttgccacaatggctgggatagatcagtcagattttcaattactaggtcatccccagatgacttctactgttagtaatccacctaaagaagaaaagaaggcgcttgaagatgaaaaaccagaaccgaagcagaatgccctagggcaaatgcaaaatatccaggtttctatttgtatgcagtcagcttacaatgaaggaacactaatgaagtttcagaaaattacaggtgatgctagaattcctttgcctctcgactcctttcctgtcccagtttctactccagagggcttaggaacttccagcaacaacctaggagtcccagctactgagcagcggcaggagtcttttgaaggattcattgctagaatgtgttctccttcaccagatgcgacttctggaactggaagtcaaagaaaagaagaggagttgtccagaaatagcagatcttcttcagagaaaaagaccaaaacaggtgaatataccaaaaaacactctgataagcaacaccctggaaaggacctgcattcctgatctgactgtcctgaaaaccagaaaagcaaagaaactagggaaactagttctttggttaatgaaccaattaaaagtaggtctttgaaaaaatacgtttctgtcaagaaagaaaatagaatagtgactgtttcatccaagacaaataaaagtaaatccagtccactagaacattctgaaagtgatactcttggatgtgattttgaatttcaagaaagcatccattctctatcacacctttcatatgactaaatcttttgaaactatgtttttacctttaaattttaataaattttcttatgtttttattatggcaaaa

SEQ ID NO: 698 - DNA, 2191 bp, Human
gagtctgtccgggaaagttccgcaagtcgcagcgccggcctgagggcgtgtatccgcggccgtagcagccgggctggtcctgctgcgaccggcggcccggagtggggcggcgggtaagtgggcacgaacgcggtggacgctgtacagtcgccttcgtcggtagggaactgctggcggcctaggggtcgtcctgagagggaaaagcgggctccggctgcatctgcggcgccctgcgtggccgtaagagccaagtggcctcagaggctcgccccctacgcaaatcctcgttgtcttgccagggtcctgacgtgacgtgcggccgcgagaaggaaggggcgggttgggggaggcgctgaggtggtagcagcggcggcttttgctgagttttctctggcccagagcgctcgggctgtcggtctagcaggggggactcccctgaggggccgctgcgggtcgccgtcttcggaggcaccggcgagggcagagccaacagcctcttcacggtctgtaaggtcattgtttgccagtcgtgggcagcgcggcaaacctgctgggaaaaggttttctggttggaataggatgagtaccgcaccagctttgccttccagctgagatgtaaatttcaggcctccatcctgtggaacgtgggaaaactatcttgagtgttggcatgttctaagtatgacataatagtttaatgtatgataaatcatgggtgtttagacgaaagatttacacatataaattggaggctttagcggtcttagtgtaactaacttttcgtccccttaacccttgatgcctgttctatgggtctctagagcggaaggagcattatactccggaaacatttgctggaaggggttatgagaaattcctctctgtatgctaactccgtaatacaagcgtttgtgtattttaaaatcacagctgttccaaatataatctagcctcgttttccccctccgtcggatgataggtgttcttcaggacagttttattttaagcaattcttagtctcaagtaaacaccatcattaaaagaactgagaactattatcaattcttcctttggagtccatcttcaatggaaaggagaagggaaaaccttttttaaaaagaagaaagaaaactgaagtttttgatttgactagagaaatattcagaagactccttattttcacctagtctaatcacaaaattgagaaacaaacattatcccttgaccatgtaaattttacaccacattatgtcaacagcatgtaccttccacattgagtattcagaaagaagtgatctgaactctgaccattctttatggatacattaagtcaaatataagagtctgactacttgacacactggctcggtgagttctgctttttctttttaatataaatttattatgttggtaaatttagcttttggcttttcactttgctctcatgatataagaaaatgtaggttttctctttcagtttgaattttcctattcagtaaaacaacatgctagaaaacaaacttttggaaaggcattgtaactattttttcaaatagaaccataataacaagtcttgtcttaccctaaagtcaaatgctgaagattctttactgctgtcatcagcatctacaagtagcatattttggatggtgtttgtgtgctacttcaaagtaactaggaaaaaataatcctcgcaacacaggtaccttgtcatgtcagaattgggggtgttaggttgccagttgtatcagtgttgattcatttcattacttcctacagagcaaacatgaacgttggagttgcccacagtgaagtgaatccaaatacccgtgtcatgaacagccggggtatgtggctgacatatgcattgggagttggcttgcttcatattgtcttactcagcattcccttcttcagtgttcctgttgcttggactttaacaaatattatacataatctggggatgtacgtatttttgcatgcagtgaaaggaacacctttcgaaactcctgaccagggtaaagcaaggctcctaactcattgggaacaactggactatggagtacagtttacatcttcacggaagtttttcacaatttctccaataattctatattttctggcaagtttctatacgaggatgatccaactcacttcatcctaaacacagcttctctcctgagtgtactaa

SEQ ID NO: 699 - DNA, 373 bp, Human
tttctacactctattatctcatgtaagtcctgcaacaactattaagtaggcccattttatggactgaaaaagcgaggcacagagtatttgcccaaggtctgagtcactgaagtatgataatgtgtgaagtgaacagtataataataatgactgaagcacagtaagaatccagtcatgctttctccttccctgatctcactaagccacacttttaggggcttacaaaccagttcttattgccaagccctctactctaccctatcctttcatgaatcggagcctagcctctgataacataaataatttacttctcttgatgtagaaagagatgacgttgttaccctgagtgacagtcacgacagaacaaaaccac

SEQ ID NO: 700 - DNA, 2938 bp, Human
  unsure 1299: unknown base
  unsure 1300: unknown base
  unsure 1301: unknown base
  unsure 1302: unknown base
  unsure 1303: unknown base
  unsure 1304: unknown base
  unsure 1305: unknown base
  unsure 1306: unknown base
  unsure 1307: unknown base
  unsure 1308: unknown base
  unsure 1309: unknown base
  unsure 1310: unknown base
  unsure 1311: unknown base
  unsure 1312: unknown base
  unsure 1313: unknown base
  unsure 1314: unknown base
  unsure 1315: unknown base
  unsure 1316: unknown base
  unsure 1317: unknown base
  unsure 1318: unknown base
  unsure 1319: unknown base
  unsure 1320: unknown base
  unsure 1321: unknown base
  unsure 1322: unknown base
  unsure 1323: unknown base
  unsure 1324: unknown base
  unsure 1325: unknown base
  unsure 1326: unknown base
  unsure 1327: unknown base
  unsure 1328: unknown base
  unsure 1329: unknown base
  unsure 1330: unknown base
  unsure 1331: unknown base
  unsure 1332: unknown base
  unsure 1333: unknown base
  unsure 1334: unknown base
  unsure 1335: unknown base
  unsure 1336: unknown base
  unsure 1337: unknown base
  unsure 1338: unknown base
  unsure 1339: unknown base
  unsure 1340: unknown base
  unsure 1341: unknown base
  unsure 1342: unknown base
  unsure 1343: unknown base
  unsure 1344: unknown base
  unsure 1345: unknown base
  unsure 1346: unknown base
  unsure 1347: unknown base
  unsure 1348: unknown base
  unsure 1349: unknown base
  unsure 1350: unknown base
  unsure 1351: unknown base
  unsure 1352: unknown base
  unsure 1353: unknown base
  unsure 1354: unknown base
  unsure 1355: unknown base
  unsure 1356: unknown base
  unsure 1357: unknown base
  unsure 1358: unknown base
  unsure 1359: unknown base
  unsure 1360: unknown base
  unsure 1361: unknown base
  unsure 1362: unknown base
  unsure 1363: unknown base
  unsure 1364: unknown base
  unsure 1365: unknown base
  unsure 1366: unknown base
  unsure 1367: unknown base
  unsure 1368: unknown base
  unsure 1369: unknown base
  unsure 1370: unknown base
  unsure 1371: unknown base
  unsure 1372: unknown base
  unsure 1373: unknown base
  unsure 1374: unknown base
  unsure 1375: unknown base
  unsure 1376: unknown base
  unsure 1377: unknown base
  unsure 1378: unknown base
  unsure 1379: unknown base
  unsure 1380: unknown base
  unsure 1381: unknown base
  unsure 1382: unknown base
  unsure 1383: unknown base
  unsure 1384: unknown base
  unsure 1385: unknown base
  unsure 1386: unknown base
  unsure 1387: unknown base
  unsure 1388: unknown base
  unsure 1389: unknown base
  unsure 1390: unknown base
  unsure 1391: unknown base
  unsure 1392: unknown base
  unsure 1393: unknown base
  unsure 1394: unknown base
  unsure 1395: unknown base
  unsure 1396: unknown base
  unsure 1397: unknown base
  unsure 1398: unknown base
  unsure 1399: unknown base
  unsure 1400: unknown base
  unsure 1401: unknown base
  unsure 1402: unknown base
  unsure 1403: unknown base
  unsure 1404: unknown base
  unsure 1405: unknown base
  unsure 1406: unknown base
  unsure 1407: unknown base
  unsure 1408: unknown base
  unsure 1409: unknown base
  unsure 1410: unknown base
  unsure 1411: unknown base
  unsure 1412: unknown base
  unsure 1413: unknown base
  unsure 1414: unknown base
  unsure 1415: unknown base
  unsure 1416: unknown base
  unsure 1417: unknown base
  unsure 1418: unknown base
  unsure 1419: unknown base
  unsure 1420: unknown base
  unsure 1421: unknown base
  unsure 1422: unknown base
  unsure 1423: unknown base
  unsure 1424: unknown base
  unsure 1425: unknown base
  unsure 1426: unknown base
  unsure 1427: unknown base
  unsure 1428: unknown base
  unsure 1429: unknown base
  unsure 1430: unknown base
  unsure 1431: unknown base
  unsure 1432: unknown base
  unsure 1433: unknown base
  unsure 1434: unknown base
  unsure 1435: unknown base
  unsure 1436: unknown base
  unsure 1437: unknown base
  unsure 1438: unknown base
  unsure 1439: unknown base
  unsure 1440: unknown base
  unsure 1441: unknown base
  unsure 1442: unknown base
  unsure 1443: unknown base
  unsure 1444: unknown base
  unsure 1445: unknown base
  unsure 1446: unknown base
  unsure 1447: unknown base
  unsure 1448: unknown base
  unsure 1449: unknown base
  unsure 1450: unknown base
  unsure 1451: unknown base
  unsure 1452: unknown base
  unsure 1453: unknown base
  unsure 1454: unknown base
  unsure 1455: unknown base
  unsure 1456: unknown base
  unsure 1457: unknown base
  unsure 1458: unknown base
  unsure 1459: unknown base
  unsure 1460: unknown base
  unsure 1461: unknown base
  unsure 1462: unknown base
  unsure 1463: unknown base
  unsure 1464: unknown base
  unsure 1465: unknown base
  unsure 1466: unknown base
  unsure 1467: unknown base
  unsure 1468: unknown base
  unsure 1469: unknown base
  unsure 1470: unknown base
  unsure 1471: unknown base
  unsure 1472: unknown base
  unsure 1473: unknown base
  unsure 1474: unknown base
  unsure 1475: unknown base
  unsure 1476: unknown base
  unsure 1477: unknown base
  unsure 1478: unknown base
  unsure 1479: unknown base
  unsure 1480: unknown base
  unsure 1481: unknown base
  unsure 1482: unknown base
  unsure 1483: unknown base
  unsure 1484: unknown base
  unsure 1485: unknown base
  unsure 1486: unknown base
  unsure 1487: unknown base
  unsure 1488: unknown base
  unsure 1489: unknown base
  unsure 1490: unknown base
  unsure 1491: unknown base
  unsure 1492: unknown base
  unsure 1493: unknown base
  unsure 1494: unknown base
  unsure 1495: unknown base
  unsure 1496: unknown base
  unsure 1497: unknown base
  unsure 1498: unknown base
  unsure 1499: unknown base
  unsure 1500: unknown base
  unsure 1501: unknown base
  unsure 1502: unknown base
  unsure 1503: unknown base
  unsure 1504: unknown base
  unsure 1505: unknown base
  unsure 1506: unknown base
  unsure 1507: unknown base
  unsure 2016: unknown base
  unsure 2017: unknown base
  unsure 2018: unknown base
  unsure 2019: unknown base
  unsure 2020: unknown base
  unsure 2021: unknown base
  unsure 2022: unknown base
  unsure 2023: unknown base
  unsure 2024: unknown base
  unsure 2025: unknown base
  unsure 2026: unknown base
  unsure 2027: unknown base
  unsure 2028: unknown base
  unsure 2029: unknown base
  unsure 2030: unknown base
  unsure 2031: unknown base
  unsure 2032: unknown base
  unsure 2033: unknown base
  unsure 2034: unknown base
  unsure 2035: unknown base
  unsure 2036: unknown base
  unsure 2037: unknown base
  unsure 2038: unknown base
  unsure 2039: unknown base
  unsure 2040: unknown base
  unsure 2041: unknown base
  unsure 2042: unknown base
  unsure 2043: unknown base
  unsure 2044: unknown base
  unsure 2045: unknown base
  unsure 2046: unknown base
  unsure 2047: unknown base
  unsure 2048: unknown base
  unsure 2049: unknown base
  unsure 2050: unknown base
  unsure 2051: unknown base
  unsure 2052: unknown base
  unsure 2053: unknown base
  unsure 2054: unknown base
  unsure 2055: unknown base
  unsure 2056: unknown base
  unsure 2057: unknown base
  unsure 2058: unknown base
  unsure 2059: unknown base
  unsure 2060: unknown base
  unsure 2061: unknown base
  unsure 2062: unknown base
cgggcgatcagaagcaggtcacacagcctgtttcctgttttcaaacggggaacttagaaagtggcagcccctcggcttgttgccggagctgagaaccaagagctcgaaggggccatatgacactcctcccggacccctggacacacacagccctggagactggagccttggagcatggcaagtccagagcaccctgggagccctggctgcatgggacccataacccagtgcacggcaaggacccagcaggaagcaccagccactggccccgacctcccgcacccaggacctgacgggcacttagacacacacagtggcctgagctccaactccagcatgaccacgcgggagcttcagcagtactggcagaaccagaaatgccgctggaagcacgtcaaactgctctttgagatcgcttcagctcgcatcgaggagagaaaagtctctaagtttgtggtgtaccaaatcatcgtcatccagactgggagctttgacaacaacaaggccgtcctggaacggcgctattccgacttcgcgaagctccagaaagcgctgctgaagacgttcagggaggagatcgaagacgtggagtttcccaggaagcacctgactgggaacttcgctgaggagatgatctgtgagcgtcggcgcgccctgcaggagtacctgggcctgctctacgccatccgctgcgtgcgccgctcccgggagttcctggacttcctcacgcggccggagctgcgcgaggctttcggctgcctgcgggccggccagtacccgcgcgccctggagctgctgctgcgcgtgctgccgctgcaggagaagctcaccgcccactgccctgcggccgccgtcccggccctgtgcgccgtgctgctgtgccaccgcgacctcgaccgccccgccgaggccttcgcggccggagagagggccctgcagcgcctgcaggcccgggagggccatcgctactatgcgcctctgctggacgccatggtccgcctggcctacgcgctgggcaaggacttcgtgactctgcaggagaggctggaggagagccagctccggaggcccacgccccgaggcatcaccctgaaggagctcactgtgcgagaatacctgcactgagccggcctgggaccccgcagggacgctggagatttggggtcaccatggctcacagtgggctgtttggggttcttttttttatatttattccttatactattattcagttattctggaggacagtcttgcatctgtcacaccatgactgaagtgcaggtggcgtcacattatgtnnnnnnnnnnnnnnnnnnnnnnnnnnnnnnnnnnnnnnnnnnnnnnnnnnnnnnnnnnnnnnnnnnnnnnnnnnnnnnnnnnnnnnnnnnnnnnnnnnnnnnnnnnnnnnnnnnnnnnnnnnnnnnnnnnnnnnnnnnnnnnnnnnnnnnnnnnnnnnnnnnnnnnnnnnnnnnnnnnnnnnnnnnnnnnnnnnnnnnnnnnnnnnnnncacacagtgtgagccaccacccctggcctggggttcatttttaatgggaaaagccactgggggctctaactcgctgggtgactttggacaagcccctcctctggtcctcaatttctccatctgtattggacagaggtgctcctgggaccccttggaagcctctgcttgtgtcccacgtcctcttgatgccagggccacttcatctccaaaacacaaaaccaactgccaaaaccgtccagagcagtgtccaccccaccagtgtctttgtgggaagctggagaagaagtttacctcacacattctagacaaaacttagtccatttccttgaagacagttctctccagctgctccaaggcttttctctctgttccttccaccttggaattgctttaaaatatttccatccattatcctaatactatcttagtattctagcccttcccccttaccatgtagacctgacaaagcaaaacaaaagctcacctattgccctcaagaacagcctctnnnnnnnnnnnnnnnnnnnnnnnnnnnnnnnnnnnnnnnnnnnnnnncacggtgggagttgtatgccatccttttgaagggtgggaggaccctggaccagaaagcaataatggcataagattctgtgataccaggcatttttggcaagggaagttgccaacaatttttctggctgggatggcatagcacattgtctaggggtggattttcattcataaggcagctgttccctgaatggcttccctgggttatgtagaaacagcctggggaggaggtgatacaacatacttaatggggcctctgggcagaaaacagactgaatcctcaacactgccccttttgagggtctgtgatcctggaacttctctgatggactgggatgcccttaactgaggtctgctgtctggaaaggacaccacaggcccagaatgaaggggcatctggaccaatgacctagattcaacacagggcttggagctggtggtacaggctggttttggcccaatgtgtgttggaggctggaagcccctgaagacctaaactgcctggatgagcttattagggtgaattaatgagtctgtaatttgggaaccttaatgtgagacaccacttaaggagaggaacttggcccagcaagtgatcactctagaagtggacagctatgcactagactgcaccagaatctgttcaacagcgacaccttgtggtaaaaactgtagacgccccatcaggctggatgggaaactagaaacagactgtctcatctttggacagatatccctcaaatctcccaatctactccagggaaaagacacttcaagtgagagatattggacttcttgaaaatctaggcctatggaaaattaaagtgttaaatggaaaaattaaagagctatgagtctatttgtaatgatgaaacagaa

SEQ ID NO: 701 - protein, 316 aa, Human
MASPEHPGSPGCMGPITQCTARTQQEAPATGPDLPHPGPDGHLDTHSGLSSNSSMTTRELQQYWQNQKCRWKHVKLLFEIASARIEERKVSKFVVYQIIVIQTGSFDNNKAVLERRYSDFAKLQKALLKTFREEIEDVEFPRKHLTGNFAEEMICERRRALQEYLGLLYAIRCVRRSREFLDFLTRPELREAFGCLRAGQYPRALELLLRVLPLQEKLTAHCPAAAVPALCAVLLCHRDLDRPAEAFAAGERALQRLQAREGHRYYAPLLDAMVRLAYALGKDFVTLQERLEESQLRRPTPRGITLKELTVREYLH

SEQ ID NO: 702 - DNA, 901 bp, Human
cttgggggcatggcacagagctggtcctgtattctccagggtccggagctggccaggggagggaagggcgttagataaggcactctgggctgtcaggagactgcctactgggtgggtcaacttatttcccactatgacatttatatctttatttttcacaattatattgaaggcagtgggagaggggagagggtgggttttacctgatattaaggggtggcaccccttccccaggcctgatgcaggtccatctagacagctcagattagcctaggccatgccctagggacacggcctaggggagctgggctggagggggtctgcctgggtaaggggatctggcttggccctgagctgcttagggacaggtgagtccttgggggcatggcacagagctggtcctgtattctccagggtccggagctggccaggggcggggaggaggaggatggcttctcctgggagaaggtgggctggcctttcttggcaagcggtcctctggcccctggggagtggggtgggtgaggctgtgccttgtagggggagaggggagggggctttgtgtgcaccattctgtaaaacacactcaagattctaagactattaaagaggatttataacagtctagtctggaatggtagggatgctgcttcctggggcaggggaggacccagggcagagggtgtgagcagagtggctgggtctgctggagactgctggacccctcactgctctgccctccccgcaggcatctgcttctgcagcctgaaccttaggaccgtgatgggccaggctctgatgggcctgcctgcatgccggggtgcctggagtttgatttggtgctaagagaggtatagattgtacctctcaattcctgcttctgaaacgtggggtaggaggt

SEQ ID NO: 703 - protein, 90 aa, Human
LGAWHRAGPVFSRVRSWPGEGRALDKALWAVRRLPTGWVNLFPTMTFISLFFTIILKAVGEGRGWVLPDIKGWHPFPRPDAGPSRQLRLA

SEQ ID NO: 704 - DNA, 523 bp, Human
  unsure 90: unknown base
  unsure 93: unknown base
  unsure 101: unknown base
  unsure 109: unknown base
  unsure 111: unknown base
  unsure 120: unknown base
  unsure 127: unknown base
atttctggatgtctgagcttttcaaatgatacttcttttctgctgtggctttcctttctgttggactggttcccagagggtcctcttgtnttngtccttgnccctcgcntntttatatcnagttcantgttttctcttctgtcatcttccttcccagcgctgtttctccaccccctcctgctgcactcacaacagcttcccctctcctgtttagaggtggaagcatgtaagaatgcgtttgagggggatgcttgccaaaggacagcatattcaacatctggtatcaacaaggtaatgtttaaccttagactagccaaactagtgatgacctgcttccatgctgcatctgctgctttttgtgttgatgggactcagaaatcatgagaaaggtcttcagtgatccatgactgcaacaaattcttttcctaattgtgccgtatattatgcccctcaatacaacttactaatctctgcctcagtttctccatctgtgaaagtggtgtaatacttatctacctccctt

SEQ ID NO: 705 - DNA, 2876 bp, Human
agtgaatgctatgatagcagaatatggctgcagtttggaagacattgttgttgtacttggaccttcagtaggaccttgctgttttactcttccaagggaatcagcagaggcatttcataatcttcatcctgcatgtgtacaactatttgattcaccaaatccctgtatcgacatccgtaaagccacaaggattcttctagaacagggaggaattcctccacagaatattcaggaccagaaccaagatctcaacctctgtacatcttgccatcctgacaagtttttctcccatgtccgagatggccttaattttggtacacagattggcttcatatcaattaaagaatgggatacttgactggatttttgtataactgcttcctgcctccttccaaactgactgcaagagagaaatttagctgtttgatttacttaaaaccaaatggattacaatggataattcatcttttgggtatatttttactattattcaaagccaaatgattttcatttaattgtaataataactgacaaaaatcagtatgttgtagctaatatgttttatgcatgagaattattcttaaagtttgttctccctgtttattacacagatcaggaatagatttgttcagttcagtatttattggataccctctattggtcaggcattgtgttaagcatatgtgaatcaaaatgaacacaactttttcctttgagtctgatacagtgaaggagataaacacttctacaacttaaatttaattttaatagcagtagaagagaacataaggaatagaggttaattttacccagaagcaggatagagaaaatattacagagaaaatcacatatcacatgggctcgaaagatgtagaggtttttgacaaatgaagaacaaccataacaggtagagggaacaccatgaaccagggcatgaaactgaaagcgcataacatattctagagagagaagggtgtgggcatgagttagggctggaaaaacaggttggaaacagataagtaagggtctcaaatgcaatgtcaaagagcttgcagtttattttccaggcaatgagtaggcagccaaaaaaaaaaagtaaggatgtgttttttttttttcccatggcatcatatttaagaggatggatttaaattgtgtgagaccaaagcatagagactagataagaggcgatcaaaatatttcaaaaagaaataatgaagatccaatgaaggaagtggaaattaaaatagggaagagagtagatggattagagagacatttaagagatggaatcaatagatcctgttactagataatggaagtaagaggtgaggaagagtggaaaagtcattaatgactctaagatttctgcttggctgcttaccaagattggcaacaaagggagggagaaggtttggaaaaagagggaaggataatgagtttgactttacatagaatgaagggcatccagatagaaatctttggttaataattagaaatatagacctagaaattaggaggaaacctgagacagagacaaatatttcaaagcttacaatacagagatgatacctgattctattggagcaggtttgatcatctaggcagaaattaggatgagaaaaaaggagatccaataatacaaccttatagtcacagaagtaagaaaaaaaggtagttgttttgaagaagccaggataggtgtggaaagtactcaaaaagaaatcttcagggataaaataaagtgataatttaaaagaaatcaatggattaaacatattgaaactgttctataggcagtggtcattgagtcagctttcagtgcattaggaagaagatgcataggtgtcaactcttttctgacagcatttactagagaagagaaaaagctggggactacatcttcaaggaagggactttttttggatgagcagttttgagtgtgtttgtcagttaaagagaggaattaggttggttttcatttgggaaaaattgtatatatatttaatgtaagttatcacattgcatcttaaaaatattcttatttaatacatatatttcctacatgtatatgtggtagcatgatagcaaataacatttgtttggtatttccaaaggactttcatgtacattgcctcgttttacctttacagctactctgaaatacacaggcattatcccttttattcagctgagaaaactgagcttcattgaggtggaggtcaaaaatcacaaaatttgtgatgaattaagatttgaacatatgttttgtgactccagttttcctttcagattttaaaattaattaaagggatcttcattatacttttattgttaactttttgttaacataatttattcatacattcagtgaaaattttgttgaggtactgggacaggttaaaaaatacagttgtagccctcaggatatttaatatccagtgaaaagtgacagtcagtaaaccaacaatctcaatactttgatatatgttgtgaggttgtgataaccgattcttgtttagtttaattctatatctcccttagaccagtgttaaatttaaataaaacacctcattttttccaattcagggaaggcactaaacataaagcataggatagaaatgttgaactcatccaaaatattattttgtttaatgaaaatgatgaagattaaggaatacttccatgtattgagtaaggttgataattttctaattcttcactgtgcattattttgtttgaagttggtaaatttggagtatcctgcagacacattttgctttatgtactacaacattctacaaccaaataaaaattattttgattatctgaaaaaaaaaaaaaaaaaaaaaaaaaagaaaaaaaaaaaaaaaaac

SEQ ID NO: 706 - DNA, 3637 bp, Human
tttggctcggactgtcccgtgacaggcggtgcgaggaggccaggcccgcgcccgccgagccctagggccgctgctgccgacagccatggaggacgagcagcctgacagcctggagggctgggtgccggtccgggagggcctcttcgccgagcccgagaggcaccggctgcgcttcctggtggcctggaacggcgcggagggcaagttcgctgtgacttgtcacgaccgtaccgcgcagcagcggcggctgcgcgagggggcccggttggggcccgagcccgagcccaagcctgaggccgccgtctccccgtccagctgggccggcctgctctcggccgcggggctccgcggcgcgcaccggcagttggcggcgctgtggccgcctctggagcgctgcttcccgcggctgccgccggagctggacgtgggcggcggcggggcctggggtctggggctcgggctgtgggcgctgctgtggccgacgcgcgcgggtcccggcgaggcggcgctgcaggagctgtgcgggcagctggaacgctatctgggcgcggcggccgacggctgcggcggcgccacagtgcgcgacgcactcttcccggctgagggcggcgcggccgactgcgaaagcccgcgcgagttccgggagcgggccttgcgcgcgcggtgggtcgaggcggacgcgcggctgcgccaggttattcaaggacacggaaaagccaacaccatggtagcattaatgaacgtttaccaagaggaagatgaagcataccaggaattggttaccgtggcaaccatgttcttccagtacttattgcagccatttagggctatgcgagaagttgcaactttatgtaagcttgatattttgaagtctttggatgaggatgacctaggtcctagaagggtagttgccctggagaaagaagctgaagaatggaccagacgggctgaagaagctgtcgtctctattcaggatatcacagtgaattattttaaggagacagtaaaagcattagcaggaatgcagaaagaaatggaacaggatgcgaagagatttggtcaggctgcctgggccacagcaattcccaggttggaaaaacttcagctaatgctagctcgagagactctgcaactcatgagagcgaaagagttgtgtttaaatcacaaaagagctgaaattcagggaaagatggaagatcttccagaacaagaaaaaaatacaaatgttgtagatgaattagaaatacaattttatgaaattcaattagaactatatgaagttaaatttgagatattaaaaaacgaagaaatactgcttactacacagttggactctcttaaaagacttataaaagaaaaacaagatgaagttgtctattacgatccatgtgaaaatccagaggaacttaaagtcattgactgtgtggtggggctgcaggatgataagaatttggaagtgaaagaactcagaaggcagtgccagcagctggagtctaaacggggcaggatctgtgccaaaagagcctctctccggagtagaaaggatcagtgcaaagaaaatcatcggttcagattgcaacaggctgaagaaagcataagatactctcgtcagcatcacagtattcagatgaaaagagacaagataaaagaagaggagcaaaagaaaaaagaatggatcaaccaagaacgtcaaaaaacactccaacgattgagatcatttaaagataaacgcctagctcaatctgtccgaaacacctctggctcagaacctgtggctccaaacctgccaagtgatctttcccagcagatgtgcttgccagcttcccacgcggtgtcagtaattcacccgtcctctaggaaaactagaggtgttcccctatcggaagctggtaatgtgaaaagccccaagtgtcaaaactgtcatggaaatatccctgtccaggtttttgttccagttggtgatcaaacacattccaaatccagtgaggaattgtcactgccaccacctcctcctcctccaccaccaccaccgccgccaccgccgcccccaccccctcctctccgtgctctgtcctcatcctctcaagctgcaactcatcagaacttaggcttccgggctccagtgaaagatgaccagccacgtcctctagtgtgcgaatcacctgctgagcgaccacgtgactccttggaaagtttttcatgtccaggatctatggatgaagtgttggcctccttaaggcatggcagagctcctctccggaaggtggaagtgccggcggtgcgccctccccacgcctcaatcaatgagcacattctggctgccataaggcaaggggtcaaactgaagaaagttcaccctgatcttggcccaaaccccagcagcaaaccaaccagcaacagacgcaccagtgaccttgagaggagcatcaaggctgcgctccagagaatcaagagggtgtctgctgactctgaggaggacagtgatgagcaggaccctggccagtgggatggttaggctcaagtttgacaaaggcacctgccacagtaggcttgaataaagtgggtgagtcttagacctatcgaaaagcatactaacagggtgctgatagatgggccacataacaccccggaagatcagcagggccttgtgtaggctgctgcagcattttttttttttttcttttttgagatggagtctcactctgtcgcccaggctggggtgcagtggcgccatctcggctcaccgcaagctccgcttcccaggctggggtgcagtggtgcgatcttggctcactgcaagctccgcctcctgggttcacgccattctcctgcctcagcctcccgagtagctgggactacaggcgccaccaccttgcccaactaattttttgtattttttagtagagacgaggtttcaccgtgttagccaggatggtctcgatcttctgacctcgtgatccgcctgcctcagactcccaaagtgctgggattacaggtgtgagccaccacgcccagccttttttttttctttcttttgagacagaatctctctgtcatccaggctagagtgcagtggcacgatcttggcttactgcaacctccacctcccaggttcaagcaattctctgtctcagcctcccgagtagctgggattacaggcatgcaccaccacgcctggctaatttttgtatatttaagtagagacaaggtttcgctatgttggccaggctggtcttgaactcctgacctcgtgatccacctgccttggccacccaaagtgttgggattataggcatgagccaccgtgcctggctgatgctggagcttttatgtgacatggtgactcttaaaactggggagggacgtagagatgagagtttcacacaccagcccataggtgggatgtcaagacccatcggaagtgtcgctggcctaagagaagagcacttatttctcaccatggctgatctagaattgttccctgattctgaaagaagtttacactacactggtaagcagtactattagactactgactgtggccttctgtgcatatggaataatgatttctcagatttgtaggcttgaatgtgaatgttattttatcagtaatcagaataaattgcttatattcagg

SEQ ID NO: 707 - protein, 809 aa, Human
MEDEQPDSLEGWVPVREGLFAEPERHRLRFLVAWNGAEGKFAVTCHDRTAQQRRLREGARLGPEPEPKPEAAVSPSSWAGLLSAAGLRGAHRQLAALWPPLERCFPRLPPELDVGGGGAWGLGLGLWALLWPTRAGPGEAALQELCGQLERYLGAAADGCGGATVRDALFPAEGGAADCESPREFRERALRARWVEADARLRQVIQGHGKANTMVALMNVYQEEDEAYQELVTVATMFFQYLLQPFRAMREVATLCKLDILKSLDEDDLGPRRVVALEKEAEEWTRRAEEAVVSIQDITVNYFKETVKALAGMQKEMEQDAKRFGQAAWATAIPRLEKLQLMLARETLQLMRAKELCLNHKRAEIQGKMEDLPEQEKNTNVVDELEIQFYEIQLELYEVKFEILKNEEILLTTQLDSLKRLIKEKQDEVVYYDPCENPEELKVIDCVVGLQDDKNLEVKELRRQCQQLESKRGRICAKRASLRSRKDQCKENHRFRLQQAEESIRYSRQHHSIQMKRDKIKEEEQKKKEWINQERQKTLQRLRSFKDKRLAQSVRNTSGSEPVAPNLPSDLSQQMCLPASHAVSVIHPSSRKTRGVPLSEAGNVKSPKCQNCHGNIPVQVFVPVGDQTHSKSSEELSLPPPPPPPPPPPPPPPPPPPPLRALSSSSQAATHQNLGFRAPVKDDQPRPLVCESPAERPRDSLESFSCPGSMDEVLASLRHGRAPLRKVEVPAVRPPHASINEHILAAIRQGVKLKKVHPDLGPNPSSKPTSNRRTSDLERSIKAALQRIKRVSADSEEDSDEQDPGQWDG

SEQ ID NO: 708 - DNA, 792 bp, Human
gggtctcaaaagaaaaaaaaaaaattggatacattgtaatacctcaaatacttgtaagtgaagcaccccagttcccatagagctgccgcactcagaggcttctgtaacctgcctgctcccagcattctatttagggtctggtatgtccagaatttgcagacacagcaattcctgcagcagcagtgcaccatgtggaaggggccccatgaccagcccactgtgaggtcacacgtgatgactgaggcttcttcacacagcagggctctgggtgtgatacccagggcacacgcgtttgcacaggcacaggccacacaagttctcacatgctcagccccataagccgtgctggacaggcatggccatttacacccaggatcctgctgagaacagcaaccaactcaccaccctcgcatcatgatccttgccacacaggggctctggtggctttggtggcctgggctgtggctctgctgccagccaccttgagtgaagatccgggttctctgggtgctactcagctgctatgtggggagctggcccctggggtgatgagggcccttcccaacccgccctcagcccttggacagccaggatcacccggggctgtctgcatacagacttctcaggggagttctcagcttggacccttatctccccagaatcctggaacctgctccttctgctctcgtgactgactgtgttctctatgcaacttccaataaaacctcttcatttgaaaggaaaaaagtctgcattatctgtttaggaagggagagagttcatattgcaatc

SEQ ID NO: 709 - DNA, 5273 bp, Human
attcgaaagcccatcagtttgggttgtggccatactgtctgcaagatgtgcctgaataaactccaccgcaaggcttgcccatttgaccagaccactatcaatacagacattgagctcctccctgtgaactcagcattgctgcagctcgtgggtgctcaggtccctgagcagcagcctattactttgtgtagtggggttgaagacacaaagcattatgaggaagccaagaaatgtgtagaagaattagcattgtacttaaaaccgctcagcagtgctagaggagtgggtctgaacagcactactcagagtgttctgagtcgcccaatgcagaggaagcttgtgactctagtccactgtcaactagtagaagaagaaggcaggattcgtgccatgagggcagctcgatctttaggtgaacgaacagttacagagctcattctccagcaccagaatcctcagcaactctcttccaatctttgggcagcagtaagggctaggggatgccagttccttggaccagcaatgcaggaggaagctttaaagttggttctgctggccttagaagatggttctgctttgtcaagaaaagtattggttctgtttgtggtgcaaagattggagccacggtttcctcaagcctctaaaactagcattgggcatgttgttcagctcctttatagagcctcctgtttcaaggtcaccaaacgtgatgaagactcttctttgatgcagctgaaagaagaatttagaacctatgaagctctgcggcgagaacatgactcccagatagtgcagattgctatggaagcaggcttacgaattgcaccggaccagtggtcctctttgctttatggagaccagtctcacaaatctcatatgcagtccattattgacaagttgcagactccagcctcttttgcacagagtgttcaggaactaacaattgctctccagcgaactggagacccagcaaacttgaaccgactaagaccccatttggagctgttagcaaacattgaccctagtccagatgctcctcctcctacttgggaacagctggaaaatgggctggttgctgtgcgtacagtggtacatgggctggttgattatatccagaaccacagcaaaaaaggagcagatcagcagcagcctccacagcatagcaaatacaaaacatacatgtgtcgagatatgaagcagagaggaggatgccctcgtggggccagctgtacatttgcacactcacaggaggaactggaaaaatttcgtaaaatgaataagcgcctggttccgagaagacccttgagtgcctctttgggtcaacttaatgaggtgggcctgccttcagcagctatccttccagatgaaggtgcagtggatctccctagcagaaaacctcctgctctgccaaatggaattgtatcaacagggaatacagtaacacagcttattccgcgagggacagaccccagctatgattctagtctgaaaccaggaaaaatagatcatctgagcagtagtgctcctggatcccctcctgacctgctagaatctgttcctaagagtatttctgccttacctgtgaatccacattctatacctccaagggggccagcagatctgcctccaatgcctgttaccaaaccacttcagatggtacctcgaggttctcagttatatccagcacaacagacggatgtttattatcaggatcctcgaggagcagctccgccatttgaaccagcaccttatcagcagggtatgtattatactccaccaccacaatgtgtgtcccgctttgtccgacctccaccatctgctcctgaacctgctcctccctacttggatcattatccaccctacctccaagaacgtgttgtaaactctcagtatggcacacagccacagcagtacccacctatatacccatctcactatgatggccgtcgagtgtaccctgctccgtcttacacaagagaagagatattccgagaaagccctatacccattgagattccacctgcagcagtaccatcgtatgtaccagaatccagagaaagataccaacagatcgagagttactatccagtggctcctcatccaactcagatcagaccttcgtacctcagagaacctccttatagccggcttcctcctcctccccagcctcatcctagtctagatgaactacatcgccgacgaaaggaaataatggcccagctagaggaaagaaaggttatctctccacctccttttgcaccttcaccaaccttgcctcctacctttcatccggaagaatttttggatgaagacttgaaggtagctgggaaatacaaaggaaatgattatagccaatactctccctggtcatgtgacaccatcggctcctacattggaaccaaagatgcaaaacccaaagatgttgtggcagcagggagtgtggaaatgatgaatgtggagagtaaaggaatgagggaccagcgattagatcttcagagaagagcagcagaaaccagtgatgatgacctcatcccatttggagaccgaccaacagtgtctcggtttggtgccatctcacgaacttccaaaactatatatcagggtgctggtccaatgcaggctatggcacctcagggagctcctacaaaatctattaacatttcagattatagtccatatggaacccacggtggctggggagcttctccatattcacctcatcaaaacataccttctcagggacacttcagtgagagggagagaatatctatgtcagaagtggccagtcatggaaaaccccttccatctgctgagagagaacagctacgactagaattgcagcaattgaaccatcagattagccagcagacccagctacgtggactagaggctgttagtaacaggctggtgttgcagagggaggcaaacaccctggcaggccagtcacagcccccaccaccgccacctccaaaatggcctgggatgatctcaagtgagcagttgagcttggaactgcaccaggtggaaagggaaatcgggaagagaacacgggaactgagtatggaaaaccagtgttctctggacatgaaaagcaaactgaatacaagtaaacaagcagaaaatggacaaccagaaccacaaaacaaggttccggctgaggaccttacattgacattcagtgatgtaccaaatggatcagccttgacacaagagaatatcagcctcctatcaaacaagaccagctctctgaacctgtcagaggaccctgagggaggaggggataataatgactcccagagatcaggagttactcccagttctgctccttaaaatatgaggagtcctacttttatcttctgctcctaatcagtttgtcgggcataggggtaggagaacgcataacttctaaactttttctcttaagagcggtcagagaaatccaggaaattcaccagaggcaatgtgcacaaacaccactactaaaaacaaaccctgcacatagttcacattaatgcatttttttaatttaaagaaaaagaaaattagcagtatctgcaagcaattcagattaaatttgtttttgttctgtgaatgaactttattttaataactttggacgccttggatccagggctttaaaaaaaaaagatattatatatacactctgtttgattaattgtatgatcttaatgaagtaggttttcttgtattttggtattacatacccagtgtataatttgtataattcctcacccccaatccttatcaattctcaccaccccataaacttaaaacagaccaaaaatgtcagctttcagagaattctgtggtgcttgagaaacagacagtactagactgagttattagaaaatgtgcagcaaaccaacttttcccagagctgttatttggaattctttatccctttctagatcactagcttcattggatacgtatatttttcttgacattgaagctttttgtttgtttgggagggttttatttcttgtttttattttcaacttttcaaatagaattaccaattttgaagtcctcattttcatattaaggatcatttgcattctcttaatataatcagaaagctgattcagtgtttaattagatttaaatgttgatcaagaattaactgtaacttactagcactgaaaatacatgtttggtgtttcgcctgcgttcagctcatggttggaaatttgaagcagtgcttttcaaattaaacttttgctgacatcataggatgctaaaaaacaaggacaatcaactatgttttaaaactgcaacatttgatttgaacttaaaatgaatagagccacattattttaatggatgttttgttttacttgtgaactgattgagtcttaaggatagtttatgaattgatcacttgttgctcagaatcattagtataagtaggtaggaaatagtttgaagtcatttttcatagacttaactgtccaatgttgcaaatgtttcttcatgaaaatattgaaaagagtaaggtttttttttttttttaattctgctgcacatattctgatgccatgtgtctgtgcttaattaactaagaccctataaaacgtgtttagtggggactgtttgatatagttgccctctccattcctctatttgcctgatttttttcagtttccctttctgtattttactactaaattagaaagcactggttatgtaataagttactacattgctttggttgagtaaaaacaagagtttatatttttcttgtttcttattttcttaacccttaactcctgctgaggtcataacaacctcagtctaagctctgtgtccatcatactgttaacttaaacaaatgggtggtgggggtgggaagggtaatacagtcctgccattgcctaccagtaggagagtccaaacagaacactcttttgagtagcaattatttaatttgcccagtcaaggcaccgtgtttatatactatttcacattgaatttgattatgccctacagacctggctggtcaaggatttgatatacacatattggcttgggattcgagctttcttttttatttaaataaaaatttatatatatattatatatatacatatatacatagctatatctgtatatatattgggtatgttttaaggattttttcgcatgagcgcagctgttgcgataaattgaccgattgggaggtggtagaagcactgaatgaaggtgaggctttttttttttccagttttcttatacatttgtcttcttttttt

SEQ ID NO: 710 - protein, 1109 aa, Human
IRKPISLGCGHTVCKMCLNKLHRKACPFDQTTINTDIELLPVNSALLQLVGAQVPEQQPITLCSGVEDTKHYEEAKKCVEELALYLKPLSSARGVGLNSTTQSVLSRPMQRKLVTLVHCQLVEEEGRIRAMRAARSLGERTVTELILQHQNPQQLSSNLWAAVRARGCQFLGPAMQEEALKLVLLALEDGSALSRKVLVLFVVQRLEPRFPQASKTSIGHVVQLLYRASCFKVTKRDEDSSLMQLKEEFRTYEALRREHDSQIVQIAMEAGLRIAPDQWSSLLYGDQSHKSHMQSIIDKLQTPASFAQSVQELTIALQRTGDPANLNRLRPHLELLANIDPSPDAPPPTWEQLENGLVAVRTVVHGLVDYIQNHSKKGADQQQPPQHSKYKTYMCRDMKQRGGCPRGASCTFAHSQEELEKFRKMNKRLVPRRPLSASLGQLNEVGLPSAAILPDEGAVDLPSRKPPALPNGIVSTGNTVTQLIPRGTDPSYDSSLKPGKIDHLSSSAPGSPPDLLESVPKSISALPVNPHSIPPRGPADLPPMPVTKPLQMVPRGSQLYPAQQTDVYYQDPRGAAPPFEPAPYQQGMYYTPPPQCVSRFVRPPPSAPEPAPPYLDHYPPYLQERVVNSQYGTQPQQYPPIYPSHYDGRRVYPAPSYTREEIFRESPIPIEIPPAAVPSYVPESRERYQQIESYYPVAPHPTQIRPSYLREPPYSRLPPPPQPHPSLDELHRRRKEIMAQLEERKVISPPPFAPSPTLPPTFHPEEFLDEDLKVAGKYKGNDYSQYSPWSCDTIGSYIGTKDAKPKDVVAAGSVEMMNVESKGMRDQRLDLQRRAAETSDDDLIPFGDRPTVSRFGAISRTSKTIYQGAGPMQAMAPQGAPTKSINISDYSPYGTHGGWGASPYSPHQNIPSQGHFSERERISMSEVASHGKPLPSAEREQLRLELQQLNHQISQQTQLRGLEAVSNRLVLQREANTLAGQSQPPPPPPPKWPGMISSEQLSLELHQVEREIGKRTRELSMENQCSLDMKSKLNTSKQAENGQPEPQNKVPAEDLTLTFSDVPNGSALTQENISLLSNKTSSLNLSEDPEGGGDNNDSQRSGVTPSSAP

SEQ ID NO: 711 - DNA, 462 bp, Human
  unsure 364: unknown base
gatccctcgagttcagttagtattctgtccagagtgtttagctcactttcttagcagtgtgtaagctttctccatgtcagaagcaagcctgctctttgataaatctgtcttcctgaaaatctaaatcatgcttttgtctttagatctacacagaaatgaccctccttggatcagttttctttccagtctaatcatctttggaactaaaacttgttctaactcgtctcttggcattcagctactcctagatcttttggttttatcccctggcctcagagccatttatattcccagagtaggcagtacaggatctcgtgttgatttgctgtggttacccagtgtcttctctacatggcataaagcngcaaagcccaccattaggtgaggcggtcccgagttgaggtagagtggggcagaggaagatggcagtgaatatcaaacagtagaccgccatcaacttct

SEQ ID NO: 712 - DNA, 553 bp, Human
  unsure 59: unknown base
  unsure 64: unknown base
aaaggcccactgataatgctgcactggaaatgctaaacccaatgttaactaaagtcaanatttnccgctctacgcttactggcaccacttcatgcctacatcatgggaaagtacctcttttacagaatgcagatcactgctaacaatccacatgactaagtcttcagtttcccttgcttaacatttgttagcatatatttcagcaaagattaacagtataatgaatgttgagtagtaaaatcctatttaattcgcttcaatttaaaaatgagatatgctgctatggggaacaaatgacctcttgagatttacaaccccctttataaaagtgggaaagctgcctccctaaaaaaaattatgtccaaggttaataccgtatctttttttgtagttttcttatttcttgattttattggcacctcccaggcactttggcatgtgctcctgtataaagtgtagttactgtgcctgtagagttagtggcagctgcagagtagttataggctgacaagtccacttttggcttaccatggagatctgctccaacacatgc

SEQ ID NO: 713 - DNA, 4418 bp, Human
gagaaaaaaagaaaaaatgcaaatggaataattttctattatattttagacaaacatatcattttcgagtattttaaatactggaattcatagtggtggttttttaaattccaacagtaacagctgaatgggtttaatctggactgggcttcctaagaaatgtttaagactcagctttaaaaagaagttaacattcatatctcggtttggaaatcaaaaatcatatttcaaaattctttcctaggaccatctatgtgtctcccctcccctccacaaaagggagaaagagtgcattaaaatgtttagttgggttttttaatttttaatttttatgttatgttttgctttgttttaagtaaacaaaaatttttctttctttactgcatgcatagcacttaataaaatggatttttaaaaaatccactagtaatatcagaatgtccagggagtgactgtcactacaatgatggtttagtttacttctgttccaccttttgattgaaatatttagttgttaggctgaaagcctcggcagttaagaacttgcctgagttttcttcgttcagcaacttgacagtttgactgatgtgcattatatatagctcaattatgtctgttttttatgctaagtaggaaaaccaaccacacacattagcaaaccggcctcaacatataattagaataaactgtcttcttgttctactcagggcctttaggtgtgttcattcacggtatggaaatacagtaaatgaaagattccaactagttgtcagtgcttcttgaaattccaaacagaaagatacattggtcaaatccaacacttggcttatcaatattaagtcttttacctaaaggcccagccgtcaccagacaacagaataatcaatctgcctgaaaatccctcctccttgtcctacactttttgcctgtttgggagaatatctttgtactccattctcctccctcagccagttactgggtcacccatccatgtgttcatgaatcaatcatcacggcctgcagagcacctgtcctaaggagggaaaatcctgtcacactgcctctccccattcgtgtgtggttttcttgatcggtgagatctgtctctgaagtcactgccagcctccctgggaacgtctatagtgcctcccctgccttatgtgatgggagttaacaactcagataagtacacctgagagcatttctatcaggtaaactgtcacttaaatggaggtgtccacatcttaattgtttctccttgacacatttctcaatccacgaagccaggagaggtagagtgaaaatcccagccatggatgaatgtactaatttgaaagccaagtgttaagtcggatgttttcccgttacactactactcagccctctcctgcggccacatcaacggatgcaagtcacagtcttaacacagcctgtgggagacaagcagtttgtgtgctcacagtatatattatagtaattagggtgacttagagcaaatactcttcagatcctatgtagtcagtgaaacaaaatggagagcgtattctgatagaaggacgtcgacggtgaatgttctggtggttgttgcctgttaagtaaactttagtgtgtaagttgagtttgtcattaaaatcataaaccagctgcggtaacagacaagcctttggctggggagttttaagcctcggtaactgctataaaactagccatccagttaggatagaatgtgtttctttctggttaaaaaaaggaaaaaccatctaagaaaatatatatgtatgtatgtgtgtatacagtggaattcaagggaccaaagcaaaatttgaacaggaatctattaatttagaattttataagatatttattaataaatgttatttttaaacattccatttgaacagtattctgtaggatctacttgtttttaaagtgttagtccataataaactactatagttatgtgtattttcatttttcagggtttcaaatggctattctccatcatttggtggaaatgtttgcttagatctctgtgcatagacatttcaaggatttttattgctctgtgagttattttttaatcaacattctgaacagttttttttaaacatttatttctgtgtgttcatttttaaagtaagctctttcatttaggaagcagagttcagctaaagggaatcagtaactctaactggaacagctttcttgtagaagtgtaaaaacagcttcatctctgcctctctccaccccaccccaatttcctagaaagccttgcactattcagctcccttagtgctttttgtcccttcccgaacaatatgcagtagctttaagccattcaagctccattatgcagtatatctgagaagggaaaggaaacaacccatttaaatttgaataaaaccgtgcctatgcgaacagtagcaatttagaatctcttttctgcttttaaaataatttatatttaaaaattgcactttagctttttgatccctttgtatttctcttattctcttttaacctcttctctgtcctcaaacttgcctttgctctcctttacaataccccccacccctcctccaaggctctgagcggcatcatttaaaatactttactttacagatatttgcaccaggtacatttatgtgcgtccattggtagcacagctgagacctgtgtctcacatcagcctaggtgaagcctactacaagaatgccaaggagaagagccagtacactatatggtttatactctttatccctttattcatagcatgttttttaaaaatgttatattatgcaacagatgtgaggcagcagctaagctatacttaagaattttctctcaccttccaaaccaaagtgtcctgaataagccaggagacttattcttttgtgcaccctggtgcacatctgactgttgtcctagccatagactctctgaggccactgaaagaacagtggccctatcgatttcattcctaggtctcaaaaatacaatgttgccttgtaacataattagggacagcacctctatttcacaattataatctaaggtaggataagacgacacagcagcaataaacttacaagtaaaattcaataccaaaacaaacacaaagaaatttaaaaaacaaaaaacctagctcatcatgttgtgaaaatgaaaaagtgaatgtccattcaaaatattttactatttcttgtggagtttttcagtgatgtaatgcttgtagccaaattgcttaaagagtgtttatatatttttttccttataaattgtctattttttaaaaaagctatttaaccacagctgaagtggggggtaaggccaaattgccaacacttgttaaaagattaatactcttaagtggcactctgatacctttccaacttgtcatcagaaaggaatcaataattaccaactgttgtatttagaccaacttacaatatctagctcattagaagccaggatctagaaagctccttctaagccatttaagatattcttacattgagcttcatattatagaactttataggattggatattttacaatagaataatttagcctcaggactgagaatgtggaagctgaataaattagctttaaatacatcattaaaatcttatgcacaataagctcattagattctagttttctcctttagaataccaatgccacagacactacaggagataatgaaaggtatcagttgtgttgagtggagggagtttaagagaaaggacccttcccaaccagcagccagtagaaaatacaacctactcacctttttcccttctaagttctgctaaatcacatctgcctcatagagaaaggaatgttgcctttgagaactgtcttggagaacagataagcttgaaatgttctctctagagaggacatagggtttgggatcctctgaaaaggcccagaaaaatagctcagttcaaatacaatgttctaggacaattggaatataaatattgtccaaaaatataattaaaagaaaaaagtttagcactgtgtaaagtaagtgttaactgaggaagtcccaaaaaggtgctgtcactttaagttctggacttggggttctttgtatttgtaaacagcaaagcatttgtgtttgtttgtctatttgtaaagcaaccaccttccttattggaaggagaaaaaaaggggtacatacatgtaaatacttgctgcagcatttaatatgtttaattttgtgttaagctttttgttgcatcgtgaacacatttattgttaccaatggacaatgagttcattaagactgttcaactaggtcagatttttacatctctttctagcaagaagagacaagattttgtgcatttgtacaaatgttaatatcactgcaattccaatataataaagcactcaaatgcaaataaaa

SEQ ID NO: 714 - protein, 102 aa, Human
MVYTLYPFIHSMFFKNVILCNRCEAAAKLYLRIFSHLPNQSVLNKPGDLFFCAPWCTSDCCPSHRLSEATERTVALSISFLGLKNTMLPCNIIRDSTSISQL

SEQ ID NO: 715 - DNA, 1996 bp, Human
actgtgcccggactccgattttttttttactaaggtacagtaagaaaagggaaaagtgtacgttttcacttcctgaaatatgtcaggttgaatcaataatagagcacaccagaactcttggctccatttcaacctaaactattcagttctcatcaccccagaggaaattccgcctctgtgctggtcagtgatccccctggattataaaagtttaactaactcactgtgcacaaggcacggccattgccaacattctcttgcaaggtattttcccaagcccttacccaattctgtttccatgattgtgacattggggattaattctgcaggacagaactgtttatattctgtaccttaaaaacacatgcaaacatctcttgccttaagatttctggctttcctatggcccagagtcctagaagtgttttgatatttgtagcagaattttcaagtgtacatccttatcctggatattaacatttttgcatcatattggcagctggacctacagagaatttagtagactgttaacctaataagccttgaatccttttgcaccagtggtgagagaatgtggatcagagccatcacctccatgccccgtcaccctctaacaaccacatttacaacttccccagctctgagacacacttgcctccaccccttccatcaccccattttaagatgaaaataccacaccagcctggaaggaagaagttacttgcccagggccacatagtgagttaagggctgatctagagctaggaagctgtcttcctgaaccataatcctggactcttctaacctctctactcatcgcaaatagagttcattttagtgatttgaaggaagatgggacaagtattttcaaacacctgtaggacaacatggaagtgggaggagacttctactgtagctccccagagaagagagctagggctacagagttgcagttacaaggttgccctctctggcttgatccccaaaggaattttctactccaaaatagaatttttctaggatgctatttctcagtccctggagatactcaaacaaagggcttgtcacaagggtttttgtagaagctattcttcacagaggttgggggagagattaagccaaaggatctctgaggtctttttcaaatctatgattatgtggccttttgttcattgacttccatgtgttctagttgatcattacaaacctggcaggccttctcaagggttcagtaattagctgtcatttcccatttgtccagagagtgtccaacacaaaatacccctaagatcttggccaatagagaaatgtcatggaattttagaaatgacagtatctgcggagtttattccaagttatatcatttcaaagatgaagaaacccaggctcagagggagccatcacatccacaccctgtcacccttcgtggccagtgccagacagtagctagttggatgctaaaagtagaatttagatatcttaacaataagcccagcagtctttcaacttcattcgtaaatcatttttgttttgagcatctgtcacgtggcagcacttgcctggatactggagagctgagaaggaatgcgacaggcaagtcctactctcacagtgtatacattcaggaggaacaagacacacagtgccaagtaaataaagtagctgaacttcatcaaatgattttattcttaaagtcattaaagcatgtaatgttccccttttttttgtttcaggggtgtacagattgaagaagtgtaggtgtttatgtggttttagtgacaaaccccatgtgctttcattgattttatgttttatgttaaaacatcaaccgcaaggtaaaatgcatattgtatgttgttggatacgtacttaactggtatgcatcccatgtctttgggtactagtgtatgaattctaatctctgtaaatgaaatgttgtatgtgttaatatatttaatagatgtaacttaataaactggcattgaagactgacaaa

SEQ ID NO: 716 - DNA, 4162 bp, Human
  unsure 3539: unknown base
  unsure 3540: unknown base
  unsure 3541: unknown base
  unsure 3542: unknown base
  unsure 3543: unknown base
  unsure 3544: unknown base
  unsure 3545: unknown base
  unsure 3546: unknown base
  unsure 3547: unknown base
  unsure 3548: unknown base
  unsure 3549: unknown base
  unsure 3550: unknown base
  unsure 3551: unknown base
  unsure 3552: unknown base
  unsure 3553: unknown base
  unsure 3554: unknown base
  unsure 3555: unknown base
  unsure 3556: unknown base
  unsure 3557: unknown base
  unsure 3558: unknown base
  unsure 3559: unknown base
  unsure 3560: unknown base
  unsure 3561: unknown base
  unsure 3562: unknown base
  unsure 3563: unknown base
  unsure 3564: unknown base
  unsure 3565: unknown base
tttttgtcctcctcaaggtgggaggggggattgagagtgctctaaggagacttttcctccaggtgggaagagataaaaagacattaattagttgtttatcaagtgacatttagttgtttggttttgggttttctttttttgattgcgatttttcctctgattaaaaaaataataataaaataaaaaaaggttaactataaggagatggcctttcctcctttttttttcttaaggtgctgttttgggggaaaaaaatgtaatgaaatgaccaaaagaattacacagcattaattaaaaatggaagttttccacttccttgataatttggctatctgaataaatttgtgaatttgctaggttaagacctagttcgtggtcacatttcaacaaaacagcttgagtataaagaaaataataaaaggctgttcttatttattttcctttggtggcttttggtttgctctttttgcataggtcatgactttgttctcctgggtccagatttataaaagcagaaaattactaattaagtcaaaataagtgtctttggtgtttatgcatttgcaatttcagtaattaaatggtacatgtgttgctgtcttgtctaaaacttttaaaggcagaattatgctgttgggatattagtatgcgtataacttgatttcaaagtataaatctggaaaagtctagaatcttttctgtgaatgctatctcagtactactttaagtcaagtgtgatgctaatgatatcttaaaatttccaacaccttttgtgcagtgatcacaaagtctccacttaatttgagactgttactcagaacacgccttgcgtcacgggggctaatctaagtgtcctagtctatatgactacattacatcatgatgtattgattgcctctggcctaggaatctgcagcttaagccagtgacacaacattttgcatttttaaatggtgattctcaccaaataatgcctccccacaaaagaggaaacctaataatgccccaaatcctctttttactccatcttaatgacataaaaattaagtgaattagagaactacaatgatcttaaaataatttttcagccacatttcataaatgtggaaactgaggcacggatctgtttttgcctatgaaagataggtcctgtaactgttacacagtttaacacttctgaaattagaatattagagatcctgctaaatattacgtattgtttccttggcctctcttaatagtgccatttatatttttaatttaccagagttaggctcattaagatagtgtttgctttgaaatcaatgtttctgtggaaactaattttaacttttacagatattgattacgggcttgtgaaaaggcaagtaaaggaggaatgctgtgctatctgggcattaaaacaaaacaatacaattaaaagttaaaaagaaagaaaaaggtaataacagatttgtgtggaaggagggcaaaaaaacttcacacgtggattatctgttggagaatgtgcattgcaaaaaagatgcaaaatagcaatcctccctctagcttgatggaaatgtgttttttccatgaaacatatatgtatttttacaaatgaaagatgatttaaaatggaggcatgtgtttctactctttgagttgggaagggcttggaatctttcaaattcagtacttcccagggatagttttccttttgattaaagttttgttcttatgttactttttactgttgtttttgcagtttacctaatgctaatagggtctcaggaactgtatttgatgttaaagtgtggtttttccagaagatgacagataattgatggtctccccttttcctcagcaacatagttgtacccagagggaatttatctttagaaagatatagtttgtgaggaaagaggaggatggataagtggataaaatgtaatgcagttttaggggtggatttttaagtagcccaaggggtaggaaacctgcacagaaagaagctgcgttgtgaaaatgttgaggaggaaagtgctgcatcgctacgtgatgtggaagagactgcagtgtctgggcattgttgggaatcccgggtattttaaccatgaaacatctgacaacaaattatgtgtctagatatgtttatgtgtgaatgttcatgtatcagggattcagtttcacagttttaacttcaattttcttgtttaccccacaaatgacaaaattgcgtcattccttctctttgcccctttccaacaccaccccacaattttttaaacaatcaaaagaaaaattaaaaccagcaaaccttaaattcttgtttgttatttggatggtgaaatactgcaggtagacactgaattggacattgatttccttttctctgcgtcgaaatgtcaaggaaagttgcaagtctgtgattttgtgtttggttttttgcgtgttgcttctatggaaaaacaaaacaacaacagcagacctccctgcccaaagtgttaaaatgcctccttcataacctgagacttactttcattttctaggtgctggagaatctggtaaaagcaccattgtgaagcagatgaggatcctgcatgttaatgggtttaatggagagtaagtgtcaaatctgtgcaggggggcaccaagtaagaggaacagactttatactaacctttaggaagtataggtgggctttgggggctgggcagccagttttcacttaatttttcctgatttacatattagaaaatcctgggaagggctctttagggtccctcaccccccacccccttggatctttggtgcaacaaatactactgatgaaagcaccagtgtttgtgacaaacatctccctatcccaagaaaatcgtgcctggttgcaggggacgcttgacagcacttggccccgtgacagcccctctccgggccaggtccctgccacagtcttcggacatcactgcagtgtcttcaacgtggctttggccgccccctcgtccggcccacgctgatcactgcaaattcaccccaccccacctcacgcagatttcaatgtaatgaaccaacacaggatgttttaaactattagggaaacattgtttccataatattctcaccagaaacagatgtggaagtggcagcccgtgtttacagtttctcattttttttgtccccctttaaattaccattatgggtaaatcattgtttccctttaaaacaaaaaacaaatcagtacccctgcctacagaaaagaagagggaacatttatttaaaggatggaaagactgggagttaggcactcccagcctcactgaggggcatttttgcctttgagaagtcctcccaggtatcctggtatagcacaatgtggcaatccgtagtgggaatgaagattaaacaggagagactttgtattagacctgtgagacgagttaggaagccctgcctggcatggggaatgcaaacagggaacattcaataaatcggggaacttgcttttctccccaagaccccagatggggcctacccatcgttctcgtgtaacaaaacgtgtnnnnnnnnnnnnnnnnnnnnnnnnnnncaaaacaaaaaaactaagttgaccagtctgttttcactggtatgagagcattaaccgcactatatttcaagcacctgaaggcactagtttgtaattactagctggttggcacagtcctgttccctttcttaaacttggattcgattgaaaatttaaccttgagttgcttcagcttccatttcaaaaggggagttggagtcaaggtggtagcgtttaattataccaaccaccccccaaaacaaacaaacaaaacaaacaaaaaaacctttactagtcactaagcatccaggaaacaaaggtgaactttttcacctttcagagcaaggcaggcagctccttatggagaattctagaatttgttagatcaaataattgtttagagaaggatgacatcacccatacgaatagtcctgttagttgaggatgctttttctactttaaccctgaattcagaaggattggttgggatgcatagggggcttcttcactcatctgattatgactctcaatgggttatcaacatgcacatacgtgctattgagtaagtcagcatcacttgtcaccaaccaattccgaaattaattcttgacacacccc

SEQ ID NO: 717 - DNA, 339 bp, Human
accatataacccattctctataatgggacttgagcacccatggattctgatatcaagttgggttcctggaaccaatcccccatggataccaagggatgactgtattgcccttttcaagaaagcatctatcagctctcattcgtgactcactcagaataaggaattccttattcaaaaaacaatgtaagtattccgagctaactgttctcagccatgaacaaattaaacttggccaggtgtggtggctcatgcctgtaatctcggcactgtggaagtcaaggtgggaggactgcttaagcccaggagtttgagaccaggctgagcaaccaatgagacccc

SEQ ID NO: 718 - DNA, 401 bp, Human
  unsure 60: unknown base
gaaagatttttctatctgccccatatagtttacccttccttgccttgaaaatgaatattntagaacagagtacagctcttaaaagttattagtatcattattattatagttgttatataatactttaattaagaaagatgaaaaccttttttctttcctaagtcagcccaatggtgctattttacatatcaacacagttgaaaggaagtactgttattttgggctgcagtgtttcctccacatctaaagaaagcccattttgaaactggatactgcattaaaacaaagaaggaaaaattattttaactgtgtgcagtttttgaaattaggcatttgtactattttggttttacataattctcttgcattaacaatttactgttttgtgaatcatgtgtact

SEQ ID NO: 719 - DNA, 614 bp, Human
agacggaaagggtgccgcccatcatagaagtaccagaacttgagctggactttgctgatttagcttatggaagaggaaccagaaatttgtccttgaataatgtttcccgtgttgggctggatcttgatagcagttgttatcatcattcttctgatttttacatctgtcacccgatgcctatctccagttagttttctgcagctgaaattctggaaaatctatttggaacaggagcagcagatccttaaaagtaaagccacagagcatgcaactgaattggcaaaagagaatattaaatgtttctttgagggctcgcatccaaaagaatataacactccaagcatgaaagagtggcagcaaatttcatcactgtatactttcaatccgaagggccagtactacagcatgttgcacaaatatgtcaacagaaaagagaagactcacagtatcaggtctactgaaggagatacggtgattcctgttcttggctttgtagattcatctggtataaacagcactcctgagttatgaccttttgaatgagtagaaaaaaaaattgttttgaattattgctttattaaaaaataaacattggtattttttgagtgcttttt

SEQ ID NO: 720 - protein, 143 aa, Human
MFPVLGWILIAVVIIILLIFTSVTRCLSPVSFLQLKFWKIYLEQEQQILKSKATEHATELAKENIKCFFEGSHPKEYNTPSMKEWQQISSLYTFNPKGQYYSMLHKYVNRKEKTHSIRSTEGDTVIPVLGFVDSSGINSTPEL

SEQ ID NO: 721 - DNA, 6256 bp, Human
cccggcggtgagagtcggcccaaaaagcggcggccgttggaggtggctgcggcagctgatgtggcctcatggatgagctggtacacgacttagcctcagccttggagcagacatctgagcagaataagcttggtgaactgtgggaggagatggcgctgagcccccgacagcagaggcggcagcttcggaaacgccgaggtcggaagcgtcgttctgacttcactcacctggcagagcatacctgctgctacagcgaggcctctgagtcaagtctggatgaggccactaaggactgtcgagaagtggctccggtgaccaattttagtgactctgatgacacaatggtagccaaacgacacccagctctcaatgccattgtcaagagtaagcaacattcttggcatgaatctgactcctttactgaaaatgcaccttgtcgaccactcaggcgcaggcggaaggtgaagcgagtgacatcagaggtggctgctagccttcagcagaagctgaaggtgtcagattggagctatgagagaggctgcaggttcaagtctgctaagaagcagcgtctgtcccgctggaaggagaatactccctggacctcatcaggccacggattgtgtgaatcagcagaaaataggactttcctaagcaaaacaggaaggaaagaaaggatggagtgtgaaacagatgaacaaaaacagggctctgatgagaacatgtcagaatgtgaaaccagcagtgtgtgtagcagcagtgacactgggctctttaccaatgatgaagggcgacaaggtgatgacgaacagagtgattggttctatgaaggagaatgtgtcccaggattcactgtccctaatcttctgcccaagtgggctcctgatcattgttctgaagtagaaagaatggattctggattggataaattttcagattccacattccttttaccttctcggccagctcaaagagggtaccatactcgcttgaatcgtctacctggagctgcagctcgatgcctcagaaaggggcgaagaaggctggttgggaaggtgatacctctcacagttagcttggctcagtggggagataatattccctatgggagttgtgtatcctattaacaatcagaggtgctacagaactccctgaagttaatggagccaactggaatgtgttgggagtttacaagagtgaacattatgtagaatgtgaatggatatacaaataaaagatgaaacgtaattcatatagaagtactgacaaaaaaaaaaacactgtcattacagtgtctattgcctgtaaacctacaagcctgagctgtgtcttctgtaacttttgattaatgttatgttattattgtgtaagttaaaatactcttggcttctttatgactcctcttgaattcatgaatgcatctttgttctttcctaattttggtctttcatcctagaattcattaaaaaaaaaaaacaaaactgttactgagtttcaagagcccctccttggccatgagggagaactatctgctgtttattcagttctgcctttgccagggatggtactagggactcagctcatttaatccttccagcaacctacaagggcaagcaccttcagcagatgaggaaaacttaggttcgaagaagttaaggaatgtctgatgttacccagataggaatggtagaatagagatttgaacccaggtctacttttatctttttacatttttattgaattttattttttactctactttgagattgaggaataaattaagacagggctcatcctcagtcagagaagatggtggtgggcaaagaataaggaagggagaggcattgagagcattaatttgtttgttcacttggtaagcatttagaatgcctgctaggtggcacaatatgtgccacagtctggcttcccttaaggggatactgttttatagtctgaccagggaacagttttctgaagttttaagcatgcaaaagaaatgagactgtttatttccagacgagcccaagattcttatttctttttatctttaaattcaagttcaaatcttttttttttttttgagatggaatctcgctctgtgacctaggctggaatgcaatggtgcgatctcggctcactgtaacttcctgccttccaggttcaagcaattctcctgcctcagcctcccaagtagctgggattacaggcgccccaccatgcctggctaatttttttgtatttttagtacagatggggttttaccatgttggctaggctggtctcaaacccctgacctcaggtgatccacccgcctcggcctcccaaagttctgggattacaggcatgagccaccgtgcccggcctcaagttcaaatcttgaattagaagacatttgattattggaaaactgatacctttcaaattactcattttacagacaaaacgctgctttttctgttttgggagcttattgttaacagggatagctagcagaatagcagtacatggggtggaagaaggagaggttttacttttattgtttaggcttgacagataatgttccccctgccacctgtgttactttctttcagctcttataaaataagagccatccacttccatggaaacaagtcactttatcttgaaggtttccctttagcttgcctggaagggagtgagggcctgttggatgtgcctttaatgatttcaaatgaataggataatatttacttgtttaattcatcttcatcaccttaaagggatatttatcatttctagaagaggtcaccgctctgccccccttcttccccctcccccatctctcttctgcttttctaaattgtaatcataaataatgagtttcattcacagctccctgccagtgagctgctaattacacaaagtactgcttgtaatttacacagtaataaactgtaaatttaaacattacggcactttaagttaataatttttctgctgtaacaaatagctcatttttcacccatcttttcccttggcccccctaccatgtctgtctgtgaccaggaggcatagctataagaaatgcagaacatgaagaatatagtatatgaaaacttctcatttaactccactaccgcccggactctgacctcagagtaatttttctacagccagttctgctgaaatgtgtagcctgatgtttagcacggtccacacacatagatgaatatagacacaaatgtgtttgaagaacagccttgatgttcttggcattcacgcccgtgacttgtgttctctcaacacaacagttactcagatgtgtgttggtatgctttcccaggtgccatggtaggtaagcattgtgaatgtactcaagttaaatgaagagtgaattgccgttttccaattttttggaaatggttcgtttctgaactctttgtggtgttatgggtaagcttttacactataatcttgagaaccctgaatttaggaatcaattttatacaaatttctatttttatttcatgagatgatgtttgagggacaaagtacagagtaacaatttttgcaagtcacaaaattctcttgatgtatttatatttagtcagcagatatttacattttaccagtgaggatttggtaatgtcccaggatgaaggctgttggaactataatcaaatcacgtagctctctaggaagcttggtgtgttggcctgttaaaaattggctactgttgaactttctaaaaaaggatttttactcctatatacttcagtagttacaggaggtatagtacttattaaaataccatatatggtgaacagtgtctatgatgtatttataaagacttttggatcactagagaataataaatgtagggtaacatgtaatacttttaagatggattccaataaaaagaagtatagttgctgttttattttaagattgacttttaacatgtgccttttgaggttgccttagctggcacagttatgggaaagattgatattgtactttatatgtttgtttctgtggttggatgatactcttgtctgccttttctttttaggagaccagcataaacactttggggactgagaggataagccatatcattagtgaccctcggcagaaagatttctggttaccatcagctgggaaaagagaacgaaatcaggtaagatcatttttctttgtcatctttattttatcatttggtttccttttctttagaaagaataaagcgttggcttctgattttcctcacatttctgcttgtgcacatgaggtaaggtttcctctttcttgttattttgattttcttggagaaccgttttctaagagtatccaacacttactggtaaaaactgcagctaattcctctttgtaggttcaactgtgatcattagtttcttgtagcatatatttcataggaatcctgtttttattttagttttgaactttgcagtaagaaagcagaatgaatctgatttgcatatggtttagttcaacatcagaatcctgcattgagaagtactatgttgaagcctaaacgtatggagcagaaggtagagctgctttgggtgaagtggggtcaaagccttagagcagtggtccccaaccttatgtcaccaggaaccatttttgtagaagacagtttttccatggacccgggttgggggcgtggtgaggggggtggttttgggatgattcaaatgcattacatttattgtgtactttatttctgttgttattacattgtaatatataatgaaataattatacaactggtcataatgtagcttgtgctcctgcaactacacagtcccacctgggggtgatgggaaacaatgacagatcatcaggcattaggctttcataaggtgtgcacaacctaggtccctctcatgctcggttcacagtagggtttgcactcctataagaatctaatgtggctgttgatctgacaggaggtagagctcaggcggtaatgcccacgatggggagcagctgcttgctgacagctcacctcctgctgtgcggccccggggttggggacccctgccttagagcctctccttcttagtcttttccctggctaccccctgaggggccccttggcatatttaggcccatgtggagggctcacaatttaaaaattaactcacagtggttatcgatatgtttctttatgtgtgaagctttgtgatttttttggaggattgcattatcttggtgattagttgtaaaatagatgaacactgacaggtgaaaagttgtaggcttcctgtttgttgtgggtttttttgtttttttttttttaacaacttagtagcttactgagttgatatacacgatccacattttagacttggaatcttcattatgaatttgctgtttcaaaatgaactagagtggtagaagacataactggtgtatatgtatgagatgattttagatggcatatagatgcccaatttttaagttatgtattatagtgtacattggaaaagatgtaattatggtatcaagcctgttatttcacggaaatatagtaaggacaaagctgagcaaaaataattgatatgaggaaaaataataagtaaacagtagtacaggttgtaggcagataaggaaagtcatgaaggtggtatgtgagagactgcagtttggggaacactaagctagagcactaatcatgtttgcatcagaggatccaaaggcagaaggggacctgtggcagtcacctgatccagatccgttatttgcaaatgacgaactggagatctgtaagattcaaactatttgcccaaagtgatacagctaatagaaccaagattggaacctctgtggcagatagaacagttgcttagtttgtattctcataaaacaagtttgaagttatcattccgggttcttccagtctttgtatgtcagagggtattaagttctaaactttttagagaggactgttatgttgtgggaaaagtccaaagaaagctagcaaacataaagtgagggatctcctttgatcctcacagccaccttttgaagtcaaatagatgttttgcagatgagaaactgaaattatactctgaaagcaatatttcatttagccctcataataaccctgtaaaataggtagggcaggcctggcacagtggctcatgcttgtaatcccagcactttgggaggctgaggcaggtggatcacctgaggtcaggggttcgagaccagcctggccaacatggtgaaaccctgtctctactaaaaatac

SEQ ID NO: 722 - DNA, 1690 bp, Human
gagtattgtgagtctggagctaacaacttgtgtttcagatgtcactgcagtgatattatttttcttcacgttctttatcaccaccatggttatgttggctgccctggctcaccatttgttttactgggatgtttggtttatatataatgtgtgtttagctaaggtaaaaggctacaggtctctttccacatcccaaactttctatgatgcttacatttcttatgacaccaaagatgcctctgttactgactgggtgataaatgagctgcgctaccaccttgaagagagccgagacaaaaacgttctcctttgtctagaggagagggattgggacccgggattggccatcatcgacaacctcatgcagagcatcaaccaaagcaagaaaacagtatttgttttaaccaaaaaatatgcaaaaagctggaactttaaaacagctttttacttggctttgcagaggctaatggatgagaacatggatgtgattatatttatcctgctggagccagtgttacagcattctcagtatttgaggctacggcagcggatctgtaagagctccatcctccagtggcctgacaacccgaaggcagaaggcttgttttggcaaactctgagaaatgtggtcttgactgaaaatgattcacggtataacaatatgtatgtcgattccattaagcaatactaactgacgttaagtcatgatttcgcgccataataaagatgcaaaggaatgacatttctgtattagttatctattgctatgtaacaaattatcccaaaacttagtggtttaaaacaacacatttgctggcccacagtttttgagggtcaggagtccaggcccagcataactgggtcctctgctcagggtgtctcagaggctgcaatgtaggtgttcaccagagacataggcatcactggggtcacactcatgtggttgttttctggattcaattcctcctgggctattggccaaaggctatactcatgtaagccatgcgagcctctcccacaaggcagcttgcttcatcagagctagcaaaaaagagaggttgctagcaagatgaagtcacaatcttttgtaatcgaatcaaaaaagtgatatctcatcactttggccatattctatttgttagaagtaaaccacaggtcccaccagctccatgggagtgaccacctcagtccagggaaaacagctgaagaccaagatggtgagctctgattgcttcagttggtcatcaactattttcccttgactgctgtcctgggatggcctgctatcttgatgatagattgtgaatatcaggaggcagggatcactgtggaccatcttagcagttgacctaacacatcttcttttcaatatctaagaacttttgccactgtgactaatggtcctaatattaagctgttgtttatatttatcatatatctatggctacatggttatattatgctgtggttgcgttcggttttatttacagttgcttttacaaatatttgctgtaacatttgacttctaaggtttagatgccatttaagaactgagatggatagcttttaaagcatcttttacttcttaccattttttaaaagtatgcagctaaattcgaagcttttggtctatattgttaattgccattgctgtaaatcttaaaatgaatgaataaaaatgtttcatttt

SEQ ID NO: 723 - DNA, 592 bp, Human
aggacccagggtacacagggtgggtggctattctccagaaatgtcagtttctgggcagggcttaggtgtctgcagtccctagtcccacccctggccttgcattccagctcagcgggtggaaggtataaatttcagctgctctcagccctgctgtgtttttccaaagccttccaacagcaacatgaagttggcagccttcctcctcctgtgatcctcatcatcttcagcctagaggtacaagagcttcaggctgcaggagaccggcttttgggtacctgcgtcgagctctgcacaggtgactgggactgcaaccccggagaccactgtgtcagcaatgggtgtggccatgagtgtgttgcagggtaaggacagatgaagagttatcttaaggatcatctttccctaagatcgtcatcccttcctggagttcctatcttccaagatgtgactgtctggagttccttgactaggaagatggatgaaaacagcaagcctgtggatggagactacaggggatatgggaggcagggaagaggggttgtttcttttaataaatcatcattgttaaaagcaaaaaaaaaaaagtcgacgc

SEQ ID NO: 724 - protein, 121 aa, Human
RTQGTQGGWLFSRNVSFWAGLRCLQSLVPPLALHSSSAGGRYKFQLLSALLCFSKAFQQQHEVGSLPPPVILIIFSLEVQELQAAGDRLLGTCVELCTGDWDCNPGDHCVSNGCGHECVAG

SEQ ID NO: 725 - DNA, 485 bp, Human
  unsure 57: unknown base
  unsure 58: unknown base
  unsure 59: unknown base
  unsure 60: unknown base
  unsure 61: unknown base
  unsure 62: unknown base
  unsure 63: unknown base
  unsure 64: unknown base
  unsure 65: unknown base
  unsure 66: unknown base
  unsure 67: unknown base
  unsure 68: unknown base
  unsure 69: unknown base
  unsure 70: unknown base
  unsure 71: unknown base
  unsure 72: unknown base
  unsure 73: unknown base
  unsure 74: unknown base
  unsure 75: unknown base
  unsure 76: unknown base
  unsure 79: unknown base
  unsure 80: unknown base
  unsure 81: unknown base
  unsure 82: unknown base
  unsure 83: unknown base
  unsure 84: unknown base
  unsure 85: unknown base
  unsure 86: unknown base
  unsure 87: unknown base
  unsure 96: unknown base
  unsure 102: unknown base
attttttatataaggtcactccgatgaaaggtgattacaaaatcatctacattgctnnnnnnnnnnnnnnnnnnnntgnnnnnnnnngtcctccangcattntttggagttgataatacttcagctacaaccaagcagaatctcttttttttggaggtcctcgaagcattatttggagttgataatacttcagcttcaatttggagttgataatatttcagctagaacctagtagaatctgtttttttcctttggaggtcctcaaagcattattggagttcataatactgaagctagaaccaagcagaatctgtttttttctgaggagtatcggtagcataaatgtgattataaacatagtacacttgatatatggaggcagtgacagctatttttacaaaatttaaatctgcaaatggattcaacatgtttatgggttattaaaattgtctgatttcttaggttctttatagtacacgtgttga

SEQ ID NO: 726 - DNA, 385 bp, Human
  unsure 108: unknown base
gtgggagatgtagataccattgccccaaactatgcacttttcaggtaagctttacttttattttgtagcattaattcctatattgcaacgtaagggtgaacaatgaangctccaggcaagaaaagagaagtaagcagttttcctggacatattggccgaggtgaaaaatgtatagagaatcactggggcatcagctgcttgttgcgggaggggtgggggctctggacaccagggggtcctgacaaggctggggccagaaccctgaaccagtacacacggagacgccagcattcttccgtccagtgctgggggctcaggttatcagtgttagggagagtgtctgcgtgcggggtagaaatggaacattcgctgtaggttttttcct

SEQ ID NO: 727 - DNA, 5422 bp, Human
  unsure 600: unknown base
  unsure 604: unknown base
  unsure 3134: unknown base
  unsure 3135: unknown base
  unsure 3136: unknown base
  unsure 3137: unknown base
  unsure 3138: unknown base
  unsure 3139: unknown base
  unsure 3140: unknown base
  unsure 3141: unknown base
  unsure 3142: unknown base
  unsure 3143: unknown base
  unsure 3144: unknown base
  unsure 3145: unknown base
  unsure 3146: unknown base
  unsure 3147: unknown base
  unsure 3148: unknown base
  unsure 3149: unknown base
  unsure 3150: unknown base
  unsure 3151: unknown base
  unsure 3152: unknown base
  unsure 3153: unknown base
tgtaaaggtgggaaggtggtgtctatgtgtgtgcttgtgtatgtgggggtatagaccatatagttgatataacaacagaatttgggtgttacagacctttcagcatggatggattactaattttcaggtatcgaaactgaaatttgatacctgatcctgtggtaaagtatgttaaactatggttttggagtgattattttgaggttcattttcagcctcactgaacagtgttttacgcacatgtgaaaagtatccacatttgtttccaactaaaatttgcttttatttggtgagaaaagttgtgtgcgtgtgtttgttgtagggaataattagggaattggcaagagaggccaaaaacaaacctgaattacttttgtttcttgtgtttgagccacgattctatccagatagcagtttactctgagcagtaacaatgaacaagcagtatagcatttagcaaacctggaattgtttgtatatggttttcattcttggaagcataaagaaaaaatatgcattaaatgaattgtaaattttgacttgttaaataacatgtttttcactataactaataggattttaatatttaaagaattttgntgcntccatgacaaaatatcccattggactattttataacctcagtaatcaacatttaagagtccttaattggagatctgttttctctattacctaccatcctgcaatatgctgaaatctttctaagttgcttatcttaattctaatggtgataattgaaaaaagtgtgctggaaatacaggctcttatctggttgagtactgggggtgggaaggatttagtaatgtcataatctgttgaaggtaatatctatagataactaagatagttcctttttttttgtagttctgtgactcagacaaataagattttgagaattatgtagtttttaggtgtctgtaacatccactagtaaaacttggcaaatgaaagaaaattgtgaagtcaccactttaactgagtcaaaattttgtttgaataagctgatgaaaatagacatgtaccctagaagtagatactctaaaattatacagacatgaatgtcttttttaaaaggttgtcattattgacctaatattgagtaatctttctgcgttattccaaattgaaatttgtttgctcttcatgtaacttttatgtaaaagtcctttaaaaggggattcaattataaggctatttgactatagggcagatttttataagtaaacattcccccaattccacttatgctaactgtctcatgacagtaaagtttactcctttttagaaaccctttctcagtattttaatttctgtcattgaatcatttaaataataaccttttgtttttatagcaaagaaatcatctgacttttctgtgtgatgtttcttggcaaaataagcacttgatgtatggtcatgtacataatggatattcattaattttgtgattagtgctgagttttctaaactactatcttaagctcttaggcaccctattatggatctaattcaaaccaatatgtaggaaatggagaaagtaggacttcagtttgcgcttcccaataactttaaatatatccaccttttccaagtgtttaagccctaaaacatctatctttatttttttacctggcatttttgttagaaaatagattacgttttaaagtaacattaaaaaaattcttcagtaagataattgcttttaataagtatatttttcttgctcttggctctatacatttttgcataatattttagtcttgaaaagcttttcattttcttaactctggaaaataatagtttggaactaaattagtttgagaaatctgaatcatctctctttaaatctgttcagttagtctcatgtattctcaggggaaaatgtctttattttactaagcggaagtagtagtcatattgaggcagaaatttgtagcccaaacaaggtaggtcttcgctgaaactaatttgaactattcctatttgaagcaaattgaacactattataaatctagactggctaattagatggaaactttgatggttaggttctttaagaggcatacaatccgttatgagaatgtttatgtttatgttttaatttttatcaaaataacctcagaggaggtacatgtgagtaaactgtcttaatggttgattacttggaacccacccattaattctaaatgatgtaatggtctataaggtagtaatctggcacagcttcagtaatgtgtgctgtgtttgtaaaaaggtgaagtactttattggcattttctaagccctctgacattgttagtgtctgggttggttggtttgcattttactattatggtggaatctgtgttccttcaccattggttaagtctgaggaactaacagtgaaattcattgatggccaacttggataaaaatgaagaatgatattttcccagtttactacacatggaccaatagtgattatttgggagagaacactgggtagtattgtttgacttaagaaccttaaatatattgaaaagtaatggcattcttgctcatgatttgcatttgttagtgaggtctcaccatagtattttaatgtagcttcttattaaaattttattcataaatagtttagcagtcacagaggtgaaaaaaaaaagatttgcaccatcatatccgagtctttactaataaaatgaggctgcttaagtacccaagtggagcaagggaagagttactacagttactgtaagtctgagttagaaaaaatacagagcatctagttattgagcaaagcccccttttacctgttcgcttattcaaagagaaacaatagaatttgcttctcagtacatgtttttaaaattgagaatctctgatgtgacaaaatcaatttttacaaaagttgaattaaaaacttttaaaaattgcttgtctttgggggtatgtctacatattcgtttaaatttagaaattcccacatgtttaagatatatgcccatcccctttttagagtaatcaaaatttctatcacagttcacatactggaatacatagtaaaattgagatgtgtccaagagattttcaatgttaattagctcattctaaatagccaatataaggtaacnnnnnnnnnnnnnnnnnnnnaactagggaaaagttttaaatgtattagtatcaggctctgaggaaatttaatgcacattgactttttaaactatggattgaactcctcagtttaatacatttgtgtttttgttaactagcagcagaatttcagcatttgctacttactggtagagaagaaaaatcccacagccctgccagtacaggttagtttaatctgtaagtacctgatgttcctatttttttcaaacatatccatataactcacacaaggaagaaagctgtgcggttacttaaatgttagtataactaataatagatccattggacactttaaacactcagtacttgggccaaagtagatctaggtttgctaaccccagttgtaataaaggtgtaatactgctcctttgttatctccttgtggttcaacctaagtagatacattgtacataaaaggaaaagacagtttcagttggctatgcccttgttgatagatgatatggagtccagggctttgggtccagggtcttttacttaagctatttcatggtggttctctcattcaccttttaactttttacattatgaatcaacctaagaaaaaaggcaagtttcctcacatctagaaatgataaatggtgtacagtcataagctagaatatgtttttataatgcttttttgttcttttagcaacacttgtaaatacaagtactcctctatttttgttctttttttgtaaactataacgtatcccgttggtgtaccagtgagttcattttactgtaaactaagaataacatacctttttaatactgaaagttgactactcatcaagaaatgtagctagattctttatgtaacacttttgaggggcagtggggacataatgggttgtggaaaatgtgttttaacatttttattttttttttattctacccgagttcattgttgtttgaaccatcctctaaagatttcctttaacctctaaatgttgtgcttttaggttgataacaaatgtaaagcactgaggagggaggaataaagcatacaagttaatttctaattttcgcaagcctgaaccatcctaatctgatagtaggatgtatggcttcttccttttcaccttgtgtgatgtttaatttgagacgatctagccataaaactagtaatcttgaattcctcttgagctggatggtgattagccattgtgaaaacagattatatggaaattgtgcatattgctaaattttaaaacatggatttatcaactgataataaaatatatcttacaagataaccacttgttttttaatgtaaaattgcacaagggcttaagtttcattgcctttcacagtttaatctgtatatgaaatggtgtagatacagtggaaatggttttccttaaaaccatctctttaaagctgcctttctggtgagtactgttttatacttttatatattataattttatcttctaaaattaactgaaataggacactttgattaaagaggtgagcactctgaatttctacatctttggatattacttgaatcaagaatattagaaaattattttaccacctggcatttcccttttaatttgctagttcacttttttctgaccttcacttaacagactataaatacaaaaactttgaacacataaattatttcattttggtgagatggaataaatgtttaaaattagtatttaagaaagttcttaaacattttttttagttggcagccaaaagatttttcttagtgctttggagacattgcataggtgtaaaattaagataccagaacttcattctgttcttgttgaagctgttgttgtggtgattcatgagcagtaagctggagttagagtggaagaagggtttaccaaaattcttcctgcagactagttgcttacagggtttctttgagaggcttaaaaatttcaaaagtattatttaagccactctaaccctgcatgaaaaattggagttagaaatactgatttctgagaccacgtataccagtgaaaattagcttctgagtaaatttctaatttatgccctgctttatttagcctcgctatatgtaacacatggattattttttccctctagtttttaactatatcctagattaaaaccagcatatgctaagaatgtttttacattctgtttcctcctgtgatctttctgaaccaataataaacagtcaactgtgatgctttttagtatgaacaatgatagttttctaaaatctgaaaatcaatacctgagtatgtgatgt

SEQ ID NO: 728 - DNA, 2721 bp, Human
gtcggcggcggcggggccggtcgatggcccgggcggcggcggcggcatgcggctcctgttcctggcggtgctgcggccacacaccggcaacgcggtcacggcccagcgcgttcgggcccatctagaggctgcagggcacgtgtgcgttttgaaggatgcctttgactttgaaagccgatctgagattgcaaacctcatcttggctgagaactgcgaggctgccctggctcttcatctctataggggaggcaggcttttgcaaggccaccgaatcccttttggagtcatctttggtggaactgatgtaaatgaagatgccaaccaggcggaaaaaaacacagtcatgggcagagttcttgaggaagccagatttgctgtcgctttcacagagtcaatgaaggaaatggcacaagcgcagtgggtcgatccagtgtttacaagggaagtgaaagccaaagtgaaaagagccgctggggtacgattgattggagagatgcctcaagaagatctgcacgcggtggtgaagaattgcttcgcggtggtgaatagctctgtctctgaaggcatgtcagctgcaattttggaggcaatggatttagaagtaccggtattggccaggaacatccccgggaatgctgccgtggtgaagcatgaagtcacagggctactgttttccaatcctcaggagtttgttcatctggcaaagagactggttagtgatcctgcattagaaaaggaaatcgtagtgaacggaagggaatacgtgagaatgtatcattcatggcaggtggaaagagacacctaccaacagctcatcaggaagctggaaggaagcactgaagattgagggccccgcctcatcagacacctgctctctgacacacagctctgggtgcacactcagagacagagttctggatcacgtgggcccagtgcagttcaaataaaaccagcctcagcggaatcctagaaaatgttagtcgtgagtccccagagccactgcattcatcccatatccttctgtgcgttcagatgctgtcccaggcgtgttcaccagccagtcctgatggaggtgcatgagtgactgggttgactgggacagggaaaggggaactggttttcagggaatttgggagagaatttgattacctgccttagggctttggtgtggacaatagaggcttattttcaagcagtcatggttcagactcctcccgcctgccttctgaccaacctctccccatcgttgccagtttgaaaggcaaaagcaaaacagacgtgtcagctgagccgagtcctcgcaggatttttgttgtgatctcaggactctgacaggcacgtgggtgacccgaggcttctctgaacactagaaagcgctgtgagtgagctcacgcccggcacagctcacttttcaatggtggaattgaaagttgtgctttttagaaaagtggccaggctgcccgcaggccccgcccacctcttggctgaatttgagtggaaaaccaggaaggaacaagcgccacgtcacgcatagcctgcaaatcgcccgcgtgaccctgagatggaggcctgaggctttgggtccagggtgggctcttccccttcccacatcagggacccggggatggatgtcggaagggtcaccagcctccagcctttggcaggatggagcttgggtctgcagggctttgcagccacacagcgaggtcagtccggggccagccgcgccatcatggtaatggtggcctcgccccatccatgtcatccatgtcacatgaggacgtgcagtcttccttgtcctctcctagtggaatttgcctgggagaacctccactgaatactgaaattgttgcatgcctgtggattccttacgacaatggggaacgcggtgtttcccacctcttgtgggtagaaagcagtctgctttgaggaggcgagaaggcaaagccagggcagggcgttgctgtgggaagcgttcggtgaaagcgggtttcgacgcttaggagggccgagggagaagattccaccagcattgtccttgcttcaagttttaggatgtctgaactttcagctttcatgttttcaaccatcatttttttaatggcacaacctacatcttgtttttaaaagaagtagcctcaaattaaactccttaaactctgatgccctggggatgagaacaactagcttggatctcgtgccgtgtaattcaatgtttcattccgctgcctccatcatgtaatagaatcgctttccagaaaggcagttaactggaagcagcagaggctcccagccgtgagaggactgctcaacaatgccccccatcgccgcccccccacccctcgcaccccttgtgttttccctctgaggggcccaagggttatggctttcatgtctaggtgtggggacagaggagggagaggcagatcctgggccgggagaggatggcctggtctgaatctggagtaattaatgccacccaaagaaaaggccctgccaggtccaatgttgtcttagatctgatgatgctgctatttacaaaacactgatcgtccgaaagcttgaatctgttcctcctcgaatgaccctgtagatgcctgacctccaccgtacctccacatcactattcatgtccttctaggaaaatgtgcacatgcctcacgcactatgtgggaagggcgtgtttttaaattaataaagtgtgtcaccattagccatacg

SEQ ID NO: 729 - protein, 266 aa, Human
MRLLFLAVLRPHTGNAVTAQRVRAHLEAAGHVCVLKDAFDFESRSEIANLILAENCEAALALHLYRGGRLLQGHRIPFGVIFGGTDVNEDANQAEKNTVMGRVLEEARFAVAFTESMKEMAQAQWVDPVFTREVKAKVKRAAGVRLIGEMPQEDLHAVVKNCFAVVNSSVSEGMSAAILEAMDLEVPVLARNIPGNAAVVKHEVTGLLFSNPQEFVHLAKRLVSDPALEKEIVVNGREYVRMYHSWQVERDTYQQLIRKLEGSTED

SEQ ID NO: 730 - DNA, 1073 bp, Human
ggcgcgggagttggcattcggtggtcctggcagttagctgagcacgccctctgagccgctcggtggacaccaggcactctagtaggcctggcctacccagaaacagcaggagagagaagaaacaggccagctgtgagaagccaaggacaccgagtcagtcatggcacctaaggcggcaaagggggccaagccagagccagcaccagctccacctccacccggggccaaacccgaggaagacaagaaggacggtaaggagccatcggacaaacctcaaaaggcggtgcaggaccataaggagccatcggacaaacctcaaaaggcggtgcagcccaagcacgaagtgggcacgaggagggggtgtcgccgctaccggtgggaattaaaagacagcaataaagagttctggctcttggggcacgctgagatcaagattcggagtttgggctgcctaatagctgcaatgatactgttgtcctcactcaccgtgcaccccatcttgaggcttatcatcaccatggagatatccttcttcagcttcttcatcttactgtacagctttgccattcatagatacatacccttcatcctgtggcccatttctgacctcttcaacgacctgattgcttgtgcgttccttgtgggagccgtggtctttgctgtgagaagtcggcgatccatgaatctccactacttacttgctgtgatccttattggtgcggctggagtttttgcttttatcgatgtgtgtcttcaaagaaaccacttcagaggcaagaaggccaaaaagcatatgctggttcctcctccaggaaaggaaaaaggaccccagcagggcaagggaccagaacccgccaagccaccagaacctggcaagccaccagggccagcaaagggaaagaaatgacttggaggaggctcctggtgtctgaaacggcagtgtattttacagcaatatgtttccactctcttccttgtcttctttctggaatggttttcttttccattttcattaccacctttgcttggaaaagaatggattaatggattctaaaagcctaaaaaaaaaaaaa

SEQ ID NO: 731 - DNA, 3531 bp, Human
gattcaacttttaacactacatcaaatggaattttaagtcatcatgaccctttgctacaaatcaagacttcccagggaactgttccaactgctttggcatttgagcgcctgggcagttctgtattaagtaacagcataccacctcagtcttcaacataccgctcagctcaagagtctgcaccccatcttttacaacctcaatttagtttgttgccttcagcacttgggggatcccagcagactcctcaagcctacagttcaactctctttactagttctactgcttccattgaaagagctcttcttcgagaatgtagtgttattaaacaccatcagcggccttcaggtacccagtcaattcaggcacaactgactggttcacagcactccttacatagttatctatcaaattcaagtgtagttaattttcaggaaacaaccaggcagtcatctttatcctgtagcccaattggagattccactcaggtgagcaacggaggattacaacagaagacctcccaggtctcagtggaacttgctcagtcttactcatctgcgattccatcatcagggtatcctccttctactacaaaaataaaaagctgttctacagaacaaccactgacaccaaccaagacccctaaacctcaaagtataattcctcctgtgcaaacactaagctattccaaacctttacataatcagagttctgtaatatcgggccaagcacaaatttattctacagcgcagctaccaagccttttatcagttagtcagtcccaaaattacggtttagtacagccacataatgtgccatctattgttcattcacaggtttataggtccagcaaggttgagaaattgccacccttgtataaaacattgactttttctgggtcatctcagactataactcctgaaaatcagacgcttaattattcatctaatcagcaagaggtattgtcttcagttacaaatgagaattaccctgctcaaacaagagatctgtcttcagtaagtcagtctcaaagttactcatctggtcactctcagggtttatcaccagttagccagacacaggttagctattcatctcaatcacaagttttgtcagttgttagtctttcagaaagctatgcttcaggggagtccctaacattaacagccccttctctttcttattcttctgcctctcgggctcagaatttgccaaactctagcccgacccagaattatatttctatgcattcttcccaaaatgttcagactcaagagtcatcatctccccagtcccagaagtttttgcctgctgtccagtcatcatcttttgcatcctctactcattgtcagacattacaaaataacataacttcccctgacccaaagtcttatgctgaaagaaagcttgactcagatgtgtatccatcttcaaagcaagaagatggttttccaatgcaagagttacaggtgttgcagccacaagcatctcttgagtcatcaacccaaaggctatctgatggagaaattaatgctcaagaatcaacttataaggtgtcaaaggcagatgacagatattctcagagtgtaatcagaagtaattcccgtcttgaagatcaagttattggggttgctctgcaagcatcaaaaaaagaagaaagtgttgttggttcagtgacacaacttaaccaacaaattggccaagtcaataatgcagctacccttgatcttaagaactcaactaatttaatacagactccacaaataaggttgaatactaaagacttaaagcagcaacatcctctcatacttaaggtgcatgagtccaaggtccaggaacagcacgatcaaataattaatgcttcatctcagattcaaattccaaatcatgctttagggcatggccatcaggcatctcttcctaatacacaggtccttttagattctgcctgtgatttacaaattcttcagcagtcaatactgcaggcaggtttaggtcaagtaaaggcatctttacaagcacagcgtgttcaaagccctcaacaaatagtacatcccttccttcagatggaaggtcatgttattcaaagcaatggtgatcattctcagcagcaactccatcctcaaaattctgaagttatgaaaatggacctctctgagtcttcaaaaccattacaacaacatctaacaacaaagggccattttagtgaaacaaatcaacatgattcaaagaatcagtttgtttctcttggatcgatgtgtttcccagaggcagtgcttcttagtgatgaaagaaatattttatcaaatgtagatgatatcttagcagctacagcagcagcttgtggagttacacctactgatttttccaagtcaacttcaaatgaaaccatgcaggctgttgaagatggtgattctaaatctcattttcagcagtcattagatgtcaggcatgtgacttcagattttaactctatgacagctacagtaggaaagccacagaatataaatgatacttccttaaatggaaatcaggttactgtgaacctttcaccagtacctgcccttcagtcaaaaatgactcttgatcaacagcacattgaaacacctggtcaaaatataccaactaaagtaacttcagcagtggttggaccaagtcatgaagtccaggagcaaagttctggcccattcaagaaacagtctgctaccaatcttgaatctgaagaagacagtgaagctcctgttgatagtacattaaataataacagaaaccaagagtttgtttctagtagtagaagtataagtggagagagtgctacatcagagagtgaatttaccttagggggtgacgacagtggtgtgtcaatgaacccagctaggagtgcacttgcactgttggccatggcccaatctggggatgcagtcagtgtcaagattgaagaagaaaaccaagatttaatgcattttaaccttcaaaagaaaggagctaaaggaaaagggcaagttaaagaggaagacaacagtaatcagaaacagctgaaaagacctgcccaaggcaaacgccagaatccaaggggaacagatatttacttaccgtatactcctccttcctcagaaagctgccatgatggttatcagcatcaagaaaaaatgagacagaagatcaaagaggtggaggaaaaacaaccggaagtcaaaacaggatttattgcttctttcttagattttctgaaatccgggcccaagcagcagttttccactcttgctgtacgaatgcctaacaggactagacggccagggacccagatggttcgtacattttgtcccccaccacttcccaagccttcatctacaacacccacacctttagtgtctgaaactggcggtaacagtccatcagataaagttgataatgaacttaaaaacttggaacatttatcttcattttcttctgatgaagatgatcctggatatagtcaagatgcttataaaagcgtccctactcccttaactactttggatgctacttctgag

SEQ ID NO: 732 - DNA, 1632 bp, Human
acttttccccaactgcagtaccctctgatctctggctttcttctctcctgctcaggacctcatctattccagcccagtggacacagctcacaaggtactgattagcctgaggaccttcctgaggaggaatgaggatatccaagtgggcggtcttatccgaggccacttcctgctgatcctgcagcgtctgctagtggagcatggggcatccccatcaggagcctcggggaacctaccattgctgctgagcctcctctccctgatgcagctcaggaatgtgtcagagcaagaactggacagcgtggccatgaagctccttcaccaaggtgccctggctgcttgggatagcgcccaagggcccagggctggacgtgcagtgggtgctcactaataagcaagctgtgtgggaagtgcagccccactgacgtggacatcctgcagccctccttcaacttcctgtattggagccttcatcagaccacacccagcagtcagaaaagagctgctgcagtgctcctgagcagcacaggcctgatggagcttctggagaagatgctggccctcaccttggcaaaggcagattctcccaggactgcactcctctgctctgcctggctgctcactgcctccttctctgcccagcagcacaagggcagtttgcaggttcaccagacactctctgtggaaatggaccaagtattgaaggctctcagctttccaaagaaaaaggctgcactactctcagctgccatcttatgcttcctgcggacagccctgcgacaaagcttttcctctgccctggtagccctggtgccctcaggggcccagccactgccagccaccaaggacactgtcctagctccactgcgaatgtcgcaagtccggtccctggtcattgggctgcagaacctcctggtgcagaaggaccctctattgtcccaggcctgtgttggctgcctggaggccttgcttgactacctggatgcccggagcccagacattgccaataggagaaggtcctcttgagcaatgtcccaaggcaaggtcttggaagcattaacaacccagtgtttcttgaagctctccacgtggcctcccagccttggaatcggtttttgctgtttaccctcttggatgctggagagaattccttcctcagacctgagattttgaggctcatgaccctgtttatgcggtaccggagtagcagtgtcctctctcatgaagaggtgggtgatgttctgcaaggtgtggctttggctgacctgtctaccctctcgaacaccacactccaggccctgcatggcttcttccagcagctccagagcatgggacacctggctgaccacagcatggcccagaccctgcaggcctccttggagggccttccccctagcacctcctcaggccagccacccctgcaggacatgctctgcctgggaggggtggctgtatccctgtcccacatcagaaactgatcctcaggacttgaaggcccagaagtggagagagaatgagacctggagacaaagggcataattgttggggaaatggatgacagctgaagctattcatatggagccatatactctattgttgaaatagaataaggaaataaaatgatacactcac

SEQ ID NO: 733 - DNA, 3801 bp, Human
  unsure 2968: unknown base
  unsure 2969: unknown base
  unsure 2970: unknown base
  unsure 2971: unknown base
  unsure 2972: unknown base
  unsure 2973: unknown base
  unsure 2974: unknown base
  unsure 2975: unknown base
  unsure 2976: unknown base
  unsure 2977: unknown base
  unsure 2978: unknown base
  unsure 2979: unknown base
  unsure 2980: unknown base
  unsure 2981: unknown base
  unsure 2982: unknown base
  unsure 2983: unknown base
  unsure 2984: unknown base
  unsure 2985: unknown base
  unsure 2986: unknown base
  unsure 2987: unknown base
  unsure 2988: unknown base
  unsure 2989: unknown base
  unsure 2990: unknown base
  unsure 2991: unknown base
  unsure 2992: unknown base
  unsure 2993: unknown base
  unsure 2994: unknown base
  unsure 2995: unknown base
  unsure 2996: unknown base
  unsure 2997: unknown base
  unsure 2998: unknown base
  unsure 2999: unknown base
  unsure 3000: unknown base
  unsure 3001: unknown base
  unsure 3002: unknown base
  unsure 3003: unknown base
  unsure 3004: unknown base
  unsure 3005: unknown base
  unsure 3006: unknown base
  unsure 3007: unknown base
  unsure 3008: unknown base
  unsure 3009: unknown base
  unsure 3010: unknown base
  unsure 3011: unknown base
  unsure 3012: unknown base
  unsure 3013: unknown base
  unsure 3014: unknown base
  unsure 3015: unknown base
  unsure 3016: unknown base
  unsure 3017: unknown base
  unsure 3018: unknown base
  unsure 3019: unknown base
  unsure 3020: unknown base
  unsure 3021: unknown base
  unsure 3022: unknown base
  unsure 3023: unknown base
  unsure 3024: unknown base
  unsure 3025: unknown base
  unsure 3026: unknown base
  unsure 3027: unknown base
  unsure 3028: unknown base
  unsure 3029: unknown base
  unsure 3030: unknown base
  unsure 3031: unknown base
  unsure 3032: unknown base
  unsure 3033: unknown base
  unsure 3034: unknown base
  unsure 3035: unknown base
  unsure 3036: unknown base
  unsure 3037: unknown base
  unsure 3038: unknown base
  unsure 3039: unknown base
  unsure 3040: unknown base
  unsure 3041: unknown base
  unsure 3042: unknown base
  unsure 3043: unknown base
  unsure 3044: unknown base
  unsure 3045: unknown base
  unsure 3046: unknown base
  unsure 3047: unknown base
  unsure 3048: unknown base
  unsure 3049: unknown base
  unsure 3050: unknown base
  unsure 3051: unknown base
  unsure 3052: unknown base
  unsure 3053: unknown base
  unsure 3054: unknown base
  unsure 3055: unknown base
  unsure 3056: unknown base
  unsure 3057: unknown base
  unsure 3058: unknown base
  unsure 3059: unknown base
  unsure 3060: unknown base
  unsure 3061: unknown base
  unsure 3062: unknown base
  unsure 3063: unknown base
  unsure 3064: unknown base
  unsure 3065: unknown base
  unsure 3066: unknown base
  unsure 3067: unknown base
  unsure 3068: unknown base
  unsure 3069: unknown base
  unsure 3070: unknown base
  unsure 3071: unknown base
  unsure 3072: unknown base
  unsure 3073: unknown base
  unsure 3074: unknown base
  unsure 3075: unknown base
  unsure 3076: unknown base
  unsure 3077: unknown base
  unsure 3078: unknown base
  unsure 3079: unknown base
  unsure 3080: unknown base
  unsure 3081: unknown base
  unsure 3082: unknown base
  unsure 3083: unknown base
  unsure 3084: unknown base
  unsure 3085: unknown base
  unsure 3086: unknown base
  unsure 3087: unknown base
  unsure 3088: unknown base
  unsure 3089: unknown base
  unsure 3090: unknown base
  unsure 3091: unknown base
  unsure 3092: unknown base
  unsure 3093: unknown base
  unsure 3094: unknown base
  unsure 3095: unknown base
  unsure 3096: unknown base
  unsure 3097: unknown base
  unsure 3098: unknown base
  unsure 3099: unknown base
  unsure 3100: unknown base
  unsure 3101: unknown base
  unsure 3102: unknown base
  unsure 3103: unknown base
  unsure 3104: unknown base
  unsure 3105: unknown base
  unsure 3106: unknown base
  unsure 3107: unknown base
  unsure 3108: unknown base
  unsure 3109: unknown base
  unsure 3110: unknown base
  unsure 3111: unknown base
  unsure 3112: unknown base
  unsure 3113: unknown base
  unsure 3114: unknown base
  unsure 3115: unknown base
  unsure 3116: unknown base
  unsure 3117: unknown base
  unsure 3118: unknown base
  unsure 3119: unknown base
  unsure 3120: unknown base
  unsure 3121: unknown base
  unsure 3122: unknown base
  unsure 3123: unknown base
  unsure 3124: unknown base
  unsure 3125: unknown base
  unsure 3126: unknown base
  unsure 3127: unknown base
  unsure 3128: unknown base
  unsure 3129: unknown base
  unsure 3130: unknown base
  unsure 3131: unknown base
  unsure 3132: unknown base
  unsure 3133: unknown base
  unsure 3134: unknown base
  unsure 3135: unknown base
  unsure 3136: unknown base
  unsure 3137: unknown base
  unsure 3138: unknown base
  unsure 3139: unknown base
  unsure 3140: unknown base
  unsure 3141: unknown base
  unsure 3142: unknown base
  unsure 3143: unknown base
  unsure 3144: unknown base
  unsure 3145: unknown base
  unsure 3146: unknown base
  unsure 3147: unknown base
  unsure 3148: unknown base
  unsure 3149: unknown base
  unsure 3150: unknown base
  unsure 3151: unknown base
  unsure 3152: unknown base
  unsure 3153: unknown base
  unsure 3154: unknown base
  unsure 3155: unknown base
  unsure 3156: unknown base
  unsure 3157: unknown base
  unsure 3158: unknown base
  unsure 3159: unknown base
  unsure 3160: unknown base
  unsure 3161: unknown base
  unsure 3162: unknown base
  unsure 3163: unknown base
  unsure 3164: unknown base
  unsure 3165: unknown base
  unsure 3166: unknown base
  unsure 3167: unknown base
  unsure 3168: unknown base
  unsure 3169: unknown base
  unsure 3170: unknown base
  unsure 3171: unknown base
  unsure 3172: unknown base
  unsure 3173: unknown base
  unsure 3174: unknown base
  unsure 3175: unknown base
  unsure 3176: unknown base
  unsure 3177: unknown base
  unsure 3178: unknown base
  unsure 3179: unknown base
  unsure 3180: unknown base
  unsure 3181: unknown base
  unsure 3182: unknown base
  unsure 3183: unknown base
  unsure 3184: unknown base
  unsure 3185: unknown base
  unsure 3186: unknown base
  unsure 3187: unknown base
  unsure 3188: unknown base
  unsure 3189: unknown base
  unsure 3190: unknown base
  unsure 3191: unknown base
  unsure 3192: unknown base
  unsure 3193: unknown base
  unsure 3194: unknown base
  unsure 3195: unknown base
  unsure 3196: unknown base
  unsure 3197: unknown base
  unsure 3198: unknown base
  unsure 3199: unknown base
  unsure 3200: unknown base
  unsure 3201: unknown base
  unsure 3202: unknown base
  unsure 3203: unknown base
  unsure 3204: unknown base
  unsure 3205: unknown base
  unsure 3206: unknown base
  unsure 3207: unknown base
  unsure 3208: unknown base
  unsure 3209: unknown base
  unsure 3210: unknown base
  unsure 3211: unknown base
  unsure 3212: unknown base
  unsure 3213: unknown base
  unsure 3214: unknown base
  unsure 3215: unknown base
  unsure 3216: unknown base
  unsure 3217: unknown base
  unsure 3218: unknown base
  unsure 3219: unknown base
  unsure 3220: unknown base
  unsure 3221: unknown base
  unsure 3222: unknown base
  unsure 3223: unknown base
  unsure 3224: unknown base
  unsure 3225: unknown base
  unsure 3226: unknown base
  unsure 3227: unknown base
  unsure 3228: unknown base
  unsure 3229: unknown base
  unsure 3230: unknown base
  unsure 3231: unknown base
  unsure 3232: unknown base
  unsure 3233: unknown base
  unsure 3234: unknown base
  unsure 3235: unknown base
  unsure 3236: unknown base
  unsure 3237: unknown base
  unsure 3238: unknown base
  unsure 3239: unknown base
  unsure 3240: unknown base
  unsure 3241: unknown base
  unsure 3242: unknown base
  unsure 3243: unknown base
  unsure 3244: unknown base
  unsure 3245: unknown base
  unsure 3246: unknown base
  unsure 3247: unknown base
  unsure 3248: unknown base
  unsure 3249: unknown base
  unsure 3250: unknown base
  unsure 3251: unknown base
  unsure 3252: unknown base
  unsure 3253: unknown base
  unsure 3254: unknown base
gtctgggtgtcatgaatagacagatctataaatgtaaatatcttatacttacagtttgcctagcctgcatactagctgacccatcacaaatgattttctttaggattggtccaagagttttcaaaatctcttcactttcaattccagggcccagctgaatacaaagaacagatgctaacgctgcagctgcacgttgctcatcactcttaccttttttcaggcagcgttcaatgctatcagttaaagtcattctcctttccagaataaattcatacagcatttttgaagccagtgcatttttaataccttcaagagctgcttgccttgtcttcgcactcttatccaggttaggtcaattaatcccttcaacttgtactctaggtcttcttgagttccttcctcatcaaggacttctggtccatcttcagcaaaactggaaggatcgctataaccactgcaatggctcattgtttcaattgatgcatcttcatcactaaaaggctgaacatttcgatgctggccttagctcccgcgctagagagaaacatgtatcgttttcgatcacagctcttcacggggatttctgctgccgccaccgcccactcttacccccgccgcttctcgactctgttgttagccgaagactcgcctctcagccgcccgccgcacagacgcacgagtaaaaagtgcagctccatcggctgatcctcgctaagctccgactctgggcggcaccgggcgtcccacgatgccgaagaacaagaagcggaacactccccaccgcggtagcagtgctggcggcggcgggtcaggagcagccgcagcgacggcggcgacagcaggtggccagcatcgaaatgttcagccttttagtgatgaagatgcatcaattgaaacaatgagccattgcagtggttatagcgatccttccagttttgctgaagatggaccagaagtccttgatgaggaaggaactcaagaagacctagagtacaagttgaagggattaattgacctaaccctggataagagtgcgaagacaaggcaagcagctcttgaaggtattaaaaatgcactggcttcaaaaatgctgtatgaatttattctggaaaggagaatgactttaactgatagcattgaacgctgcctgaaaaaaggtaagagtgatgagcaacgtgcagctgcagcgttagcatctgttctttgtattcagctgggccctggaattgaaagtgaagagattttgaaaactcttggaccaatcctaaagaaaatcatttgtgatgggtcagctagtatgcaggctaggcaaacttgtgcaacttgctttggtgtttgctgttttattgccacagatgacattactgaactatactcaactctggaatgtttggaaaatatcttcactaaatcctatctcaaagagaaagacactactgttatttgcagcactcctaatacagtgcttcatatcagctctcttcttgcatggacactactgctgaccatatgcccaatcaatgaagtgaagaaaaagcttgagatgcatttccataagcttccaagcctcctctcttgtgatgatgtaaacatgagaatagctgctggtgaatctttggcacttctctttgaattggccagaggaatagagagtgactttttttatgaagacatggagtccttgacgcagatgcttagggccttggcaacagatggaaataaacaccgggccaaagtggacaagagaaagcagcggtcagttttcagagatgtcctgagggcagtggaggaacgggattttccaacagaaaccattaaatttggtcctgaacgcatgtatattgattgctgggtaaaaaaacacacctatgacacctttaaggaggttcttggatcagggatgcagtaccacttgcagtcaaatgaattccttcgaaatgtatttgaacttggacccccagtgatgcttgatgctgcaacgcttaaaacgatgaagatttctcgtttcgaaaggcatttatataactctgcagccttcaaagctcgaaccaaagctagaagcaaatgtcgagataagagagcagatgttggagaattcttctagattttcagaacttgaagactattttctaatttctatttttttttctatttcaatgtatttaaactctagacacagtttttatcttggattaacttagataacttttgtagcagtggttatattgcttataatttaatgtacaatactattgaaactggtgagttctgattattaaatattctctgtaaatcagtaaacatgtataaagtatttgtaatgtttggtcataatttatttatgaagacagcaaaagactgatttcatgatggggaaaacaattagccaaagtttaatttcttacactgtggttgtcaagaatactgatttactataatgatatatacatgcaagatatttaacttaatatcttagacaagagttctgggtacaattttgggatctagttcccctggaaaagctgctgtatttttaatttttaatggaatgtagcttttaaaatcctgtcactggcatcaacaaaaggaattataccatgagaccttatagctgtacttaaaagccattcagttcagctattgggagttcatgatgaattagcatatgccagaaaggttgctaaccttaacatctgagagcagtaacactgattttatctgctgtatgagactttgtgcattttactttgaaataaagatttttttccacactgaaagtgcttctcttctaatagaagaaatattatttatggctttgaggtacagagtccaaaatgactaggccaggtgggcagggagacaaagctttatgtgtatatttacaaacattaaagtagatgaaaagaatgtagcaatacataattgggattaaggtttctgactttcaagaatatttctgcttggcaannnnnnnnnnnnnnnnnnnnnnnnnnnnnnnnnnnnnnnnnnnnnnnnnnnnnnnnnnnnnnnnnnnnnnnnnnnnnnnnnnnnnnnnnnnnnnnnnnnnnnnnnnnnnnnnnnnnnnnnnnnnnnnnnnnnnnnnnnnnnnnnnnnnnnnnnnnnnnnnnnnnnnnnnnnnnnnnnnnnnnnnnnnnnnnnnnnnnnnnnnnnnnnnnnnnnnnnnnnnnnnnnnnnnnnnnnnnnnnnnnnnnnnnnnnnnnnnnnnnnnnnnnnnnnnnnnnnnnnnnnnnnnnttgctgcttgtttgcccatgaggtatatttctttcattttatgaaaagcattttgacaacacgttaacatttaataaactttagattaaaatatatagtgcaagcaacatgccatttcaaatccgtagacttgtttctttgatactcttgctgtaggtcgccgtgaggggtagggaagcatatatactgtagggagaagtatcaaaatcatttaaggtcttttttccaaactagtgttcccctcccacatcccaacaactcttggaagtctggtgctccctctaggtgaaaatcatttgctggcttatggagtcactgttgctgagtcccatcccccagttacagtgcagtggaaaacaggtttagaatctagaacttgtttgtatgttgtcacttggttatgttccaagtaggttagaaccatggaaaagagattgcaaatggtagtttcttctagatattcaaatgcatatatgtatgtacatgtaattataaataaataatgaatttttattaaagtgttgtatgaacataggtttttgtttgt

SEQ ID NO: 734 - protein, 451 aa, Human
MPKNKKRNTPHRGSSAGGGGSGAAAATAATAGGQHRNVQPFSDEDASIETMSHCSGYSDPSSFAEDGPEVLDEEGTQEDLEYKLKGLIDLTLDKSAKTRQAALEGIKNALASKMLYEFILERRMTLTDSIERCLKKGKSDEQRAAAALASVLCIQLGPGIESEEILKTLGPILKKIICDGSASMQARQTCATCFGVCCFIATDDITELYSTLECLENIFTKSYLKEKDTTVICSTPNTVLHISSLLAWTLLLTICPINEVKKKLEMHFHKLPSLLSCDDVNMRIAAGESLALLFELARGIESDFFYEDMESLTQMLRALATDGNKHRAKVDKRKQRSVFRDVLRAVEERDFPTETIKFGPERMYIDCWVKKHTYDTFKEVLGSGMQYHLQSNEFLRNVFELGPPVMLDAATLKTMKISRFERHLYNSAAFKARTKARSKCRDKRADVGEFF

SEQ ID NO: 735 - DNA, 1576 bp, Human
gttctcttggctgtgcttaactctggggtccaggttgacctggaagccagagacttcgagggcctcaccccgctccacacggccatcctggcccttaacgttgctatgcgcccttccgacctctgtccccgggtgctgagcacacaggcccgagacaggctggattgtgtccacatgttgctgcaaatgggtgctaatcacaccagccagagatgaggtcttgctgtgttgtccaggctggtctgcagctcctggcctcaagtgatcctccttcttcagcttcccaaagtgctaggattacaggcgtgaaccaccgcactccgccaagggagatcaagagcaacaagacagttctgcacttggccgtgcaggctgccaaccccactctggttcagctgctgctggagctgccccggggagacctgcggacctttgtcaacatgaaggcccacgggaacacagccctccacatggcggctgccctgccccctgggccggcccaggaggccatcgtgcggcacctgttggcagctggggcggaccccacactgcgcaacctggagaatgagcagcccgttcacctgctgcggcccgggccgggccctgaggggctccggcagctgttgaagaggagccgtgtggcgccgccaggcctgtcctcttaggactcaaacccagaccctggactgattttccagtccccaccgtcctgcgggacagccagcgtatgctaatgttgcaaacccatgataatgtatgtggaatatcctgccattggggttttacattaaaaccccagaatggctgcagaggggtgaacaggccccaatatttggggtgctgtgatacccctcttctacccacaaggagccctcttgatgatttctgtgaaatcgaggccccttgattgtttctgtgaaacaccctgcacccctagtcctttccccactgagatctttcgggttctctcccctaactcagctcttcgttcccagaaacccagatgtaatccccctacgtggtgcttggggcatcccgataccatctcagtaaatctcctacaatggcctcctcaccctccccgggacccacacccttcaggtcctcaccctgagacaggagggaccctctgagatcagggacccttaggtctcactgctctctgattcagagctcagctgggcccccagttccagaccccagcattcccggtcactccctccctaatctgagcatcactcaagctctttattaaactcaatttgggccagatttggtggctcatgcctgtaatcctaacactctgggaggccgaggcgggcggatcacttgaggtgaggagtttgagaccagcctggccaacatggtgaaaccctgtctccactaaaaatacaaaaacaattggctggacatggtggcatgcgcctgtagtcccagctacttgggaggctgaggcagaagaattgattgaacccaggaggcggaggttgcagtgagccgagattgtgccactgcactccagcctaggtgacaaagagagactctgtctcaaaaaaaaaaaaaaaaaaaaaaaaaa

SEQ ID NO: 736 - DNA, 8606 bp, Human
ggcacgagctgtaggagcaggggcctagcaagcgcccagcggagcgacccctgcctggccgtggctagcatggcccctacgctgttccagaagctcttcagcaagaggaccgggctgggcgcgcccggccgcgacgcccgggacccagattgcgggttcagttggcctttaccagagtttgatccaagccagattcgactgattgtatatcaagactgtgaaagacgagggagaaatgttttgtttgactccagtgttaagagaagaaatgaggacatatcagtatcggacttaaatactatttattcttatcttcatggaatggaaatattatcaaatctcagggaacatcagcttagattaatgtctgcaagagcacgctatgagagatacagtggcaatcaggttctcttttgttcagaaacgattgccagatgttggtatatcctactttctggatctgtgcttgtgaaaggctccatggtcttgcctccttgcagttttggtaagcagtttggaggaaaaagaggatgtgattgtcttgtattagagccttcagaaatgattgtggtagagaatgccaaagataatgaagatagtattctacaaagagaaattcctgccagacaatcccgaagaagatttcggaaaattaactataaaggagagcgccaaaccattactgatgatgtggaggttaacagctatctttctcttccagctgatcttaccaagatgcatctcacagaaaaccctcatccacaggtgactcatgtgtcttctagtcagtctggttgtagcattgccagtgactctggaagcagcagtttatctgatatctatcaggctacggagagtgaggtaggagatgtagatttgacacgtcttccagaaggacctgttgattctgaggatgacgaagaggaagatgaagagattgatcgaacagatccattgcaggggcgagatcttgttcgagaatgtcttgaaaaagaacctgcagacaaaactgatgatgacattgaacaattgctggagtttatgcaccagctccctgcatttgcaaacatgaccatgtctgtaaggagagaactctgctcagtgatgatttttgaagtggtagagcaggctggagctattattcttgaagatgggcaagagcttgactcatggtatgttattttaaacggcactgtggaaatcagtcatccagatggaaaagttgaaaatttgtttatgggaaatagttttggaattactcccactctggataagcagtacatgcatggaattgtcaggactaaagtagatgattgtcagtttgtctgcatagcccagcaagattattggagaattttaaaccatgtggaaaaaaatacccataaagttgaggaagagggagaaattgttatggtacatgagcatcgggaactagaccggagtggaaccaggaaaggacacattgtgatcaaggcaacacctgagcgtctcataatgcatttaatagaagaacattccatcgtggatccaacttatatagaagattttctattaacttacaggacatttcttgaaagtcctttggatgttgggatcaaactattggaatggtttaagatcgacagcttaagagataaggtgacacggattgtattattatgggtaaataatcattttaatgattttgaaggtgaccctgctatgactcgatttctagaggaatttgaaaaaaatctggaagatacaaagatgaatggtcatctccggttattgaatattgcctgtgctgcaaaggctaagtggagacaggttgtgctgcaaaaggcttcccgcgagtcccctctacaattcagccttaatggagggagtgagaagggatttggtatttttgttgaaggagtagaacctggtagcaaagctgctgattcaggactgaaacgtggtgatcagattatggaagtaaatggacaaaactttgagaatattacatttatgaaagccgttgaaattttgaggaataatactcatcttgcacttactgtgaagaccaacatttttgtgttcaaagagttactttttaggactgaacaagagaaatctggtgttcctcatattcccaaaattgctgaaaaaaaaagtaatcgccattctatccagcatgtgccaggagatattgaacagacatcacaggagaaaggaagtaagaaagttaaagcaaatactgtttcaggtggaagaaacaaaatcaggaagattttggataaaacacgatttagtatcttgcctccaaagctatttagtgatggaggcctaagccaatcacaagatgacagcattgtgggaacaaggcactgtaggcatagtctggctataatgcccatccctggaacactctcatccagcagccctgatctcctgcagcctaccaccagtatgttggatttttccaatccttcagatatccctgatcaagttataagagttttcaaagtggatcagcaaagttgctacattatcatcagtaaagacaccacagctaaagaagtagtttttcatgctgttcatgaatttggtttgaccggtgcatccgacacatattctctctgtgaagtttctgttactcctgagggtgtcataaaacagagaagacttccagatcagttctccaaattagctgatagaattcaactcaatggaaggtattacttaaaaaataacatggaaacagaaaccttatgttcagatgaagatgctcaagaactagttaaggaaagccagctatccatgctgcagctcagtaccattgaggtggccacccagctgtcaatgagggactttgatttgtttcgtaatattgaaccgactgagtacatcgatgacctttttaagttaaattccaaaacaggaaatactcatttgaagaggtttgaggacattgtaaaccaagagacattctgggttgcctcagaaattttaactgaagcaaatcagctcaaacgaatgaagattattaagcattttattaaaattgcacttcattgtcgagaatgtaagaacttcaattccatgtttgcaataataagtggcttgaacctggcatctgtagcaagactcagaggaacttgggaaaagttaccaagcaaatacgagaaacatcttcaagatctacaagacatttttgatccatctagaaacatggcaaagtatagaaatattcttagtagtcaaagtatgcagcctccaattattccactcttccctgttgtcaagaaagatatgacatttctacatgaaggaaatgactccaaagtagatggtttagtaaactttgagaagttaagaatgatttccaaggaaatccgccaagttgttcgaatgacttctgctaacatggacccagctatgatgtttcgacagaggtcactgagtcaaggaagcacaaattcaaacatgctggatgttcagggaggtgctcacaaaaaaagggcacgccgcagctctctgcttaatgccaagaagctatatgaggatgcccaaatgggcaaggaaggtgaagcagtatctttccagtctcgatgtagagacagatgaggagaagttccagatgatgtcattacagtgggagcctgcatatggtaccttgaccaagaatttaagtgagaaaagatcagccaagatcatctgaaatgtctccagtgcctatgaggtcagctggccaaacaactaaagcccacttgcatcaaccccacagagtaagccaggtgcttcaggtgccagctgttaatttgcaccccatcaggaagaagggacaaacaaaagaccctgcactgaatacaagtttacctcagaaagttttaggaacaactgaagaaataagtggtaagaagcatacagaagacactatttctgtggcgtcatctttacattctagtcctcctgcatctcctcaaggctcccctcacaaaggttacacacttattccatcagctaaatctgacaacttgtctgactccagccatagtgagatttcttcacggtccagcatcgtgagcaattgttctgttgactccatgtctgcagctctacaggatgaacggtgttcctctcaggccctggcagtccctgaatccactggggcattggaaaagacagagcacgcttcagggataggagatcatagtcaacatggccctgggtggacactcttgaagccatctctaatcaagtgtttagctgtctcatcgtctgtgagcaatgaagagatttctcaagagcatatcattatagaagcagctgacagtggtcgtggaagttggacttcgtgttcaagcagctcccatgacaacttccaaagccttccaaacccaaaaagctgggattttttgaactcttacagacatacccatttggatgaccccattgctgaagttgaacccactgactctgagccctattcctgttctaaaagctgctctagaacttgtgggcagtgtaaaggaagcctagagagaaagagttggacctcctccagttctctgtctgacacgtatgaaccaaactatgggacagttaaacggagagtattggagagcaccccagctgagtcatctgaaggcttggaccccaaggatgccactgacccagtttataaaactgtcacttcaagtacagaaaagggcttgattgtgtactgtgtcacctcacccaagaaggacgataggtatagggagccacctcccactcctccaggatatttggggatttctttagcggacctaaaggaaggaccccacacacacctaaaacctccagattatagtgtggcagtgcagaggtcaaagatgatgcataacagcctctctagactgccaccagcttctctcagtagcaacctcgtggcctgtgttccatcgaagattgtaactcagcctcagaggcataatttgcagccattccatcctaaactaggagatgtgactgatgcagatagcgaagcagatgaaaatgaacaagtttcagcagtctagcctttggatgacctatttgaaaaccactgaaagtcgtggaggaatgggcaagaaccacctcatgattctgcaggccattgctaacgaacagctcattgctacaaccagtccagaggttttattccctctactccgagcaatgaaatagacctgagttatgcttcctttcatttaatttctgcagataaatagtttcctgagcaatggatgctatgcctggataccagtctccactttgcacgccggaactgccttgggaccacagttacagaaaaaatgtaaactcagagtgatccttgtgtatattgctatagatttttctttaacaagctattttaaagataatggcattattatttccaagccatagcttgggctgaaggacaaattgaaattgtctgccaataccaaggatattcttgtatatttgaaaaataacttattatttgaattgttgtggttttgtttgtatttgagagctcttgttagctgatattcatgtttgaggtcataaaattgtctctggtctgaccaaacagaagtcatctttacagaggtgatatgcttgatctacacagagatgtgacttgatctgtagcaccaatgcaatgtaggtctcagtttgagagaaataggaagccctttgcagttgaggtgttaggaacctgctggtcatggtgtggaaggccaaatgaagctgccacagggtttcttgtcagtcctttgggaaatgggagggagtagtttggggaggagggtgggaaccctaatttccacagaatgaaattttgatgttaaatgacatgtatacaaattcttccttaagtgaaagttatgctgcatcgaattgtaactgaaagtatagatccaacaaatagagactgggttctagagagttctggtctatagaaacccaaaactaaaatctctcataactcaagtatggaatactttttttaaagaaattcttatcatgggtgttgtaataatgaagacgaatttgactttatgcagtgttctgcagcatgcctcccccacatctcatagcaccaggttgtgtctgacctgacataccctgcagctctcagctggctgcagtaacattttgtgggagaaagaggagctggagttacagaaatgattgtctcttggttctcagtttttagcccttgagaggacatacttttccagcctcatgggtatggcactcttaattaaaatttcagtgactgtttactggatgaggcagatttttcacatttttgcaaattaaatatattttatatatattaagtttaattttttcagtttttttaatgtaaaagcaagtgaaattttaataaacttctgtaattaccaaaaaaaaagaaaaaaagccaaagccattaacgtgcactacccagatcaacttggagccaaaaggggtttacttctgaatggctgtccgtatgtgtccacataggatttagttggtttgtggcctcctttatagaaatgtgttgtctttccctagctgtctctgctgtctgtcttcctgcatatcccccttcattttaaaatcatgaatcagttgtaagtggtaaatggtagtagttcatctttcccatcaacatgattgtctctttattttaggaataatagcatttcaaaaattcctgtggtaaagaaacattaatctgaaacttaagccttagaaattaatcgcaggtatgatagaatgaggcttggtggttccatagctttcttggtcctttgaaatgggaaataacctgaaccaaaaatcctagtttgaaagttacacttcagtgatttggcctataaacagtggtcctatgattatacattttttccttcactgatttgcataattttgttttcatggccacagcaaaacaatgtgaaatatatttttgctatacccactttttttatcaaattcagatgtctactctcaccattttatattcatttccccagaaaaatgtgctgttttcataatgtctttatttagcaggtctttcaaaccaaatggaagccttacctgtctttgtccttaatagtgtaaatatcttgcacagagtgttgaggcctatggttttggacttgcaccttacagctgcctttgttttatctatctagctttaactgtgagtgttcagatcagctgatcacattgatcaggagccaaagccaaatgctttgtagtttgttatgtatgtatcccttaaaaaatcatgaggttttgatttttatattttaactaagggtacattcctgccttctcttagtttgtcatatgactagaacaagagaagtcttaagctgcatttactccaattccagatctccatttgtttttgttttataaatttataatcttaatgaagagactagtgccctctcttcctgccacaactctcaatctgccaagactgttgaagcagttaacgctcagtgcaaacttttgccaaatagtaagtttcaacaaaatatctttatagtgaaagattttgagaattagtaaatccagtacatgattccataaaagcttattaaagttaataattctaatttactccaaatgattactttcaatatgatctttggggagaaaaagcctttagtgaattttcttgagggtgataaatcacatcattgcgatctatatcacctccttgagaatctctcccaggctgaaaatgtgatggtaatcatgggtgtttttaagaacaaatctaatttttatcaagtgttctttcctctacaaaaaaggaaggaggagaaaaagcttccttaaaactgattattttgattcaattttaagtttctaaaaaaggtgatattaaagtatatgtattccttcagcattaccttaaaggctagaaaaacgggataaatcttcagaaaagtgtcaaaagtgtcacagtacatgttcaaatttaaacttgaatcctggttcatctttgacttttgttgtgcatttttaatgcttctttatttttgatacacagaatgcagttgaacttgatcttttaaaattgagacatgtaagctaatcagcaaaagacagaaacaaaactgcacatctgtaataatcagatagcaattctactgcacaattcattgattgtaaggtatcctgtaacaagcaatgtttgtctcctattttttgatacctcttaaacttatgtcttttagaaagacagtgcctctgtatgctttttgtatttttactgagtgtaaatatttgttatatttttggttaagagaatgtaaaaataccatttattattatcatatctactaatacattggtggaatcaataaagaatctacattaatcttctctgtacttaattataaatgtatggaactgatgaaataattacaaacttagtcattcgagagtgccagtctgggtcctgtgttggtgtgaaggccttattttttaactatccagaaaaattggagtggtccatttgttgttggttatgtcaaatctgtgaaacaccatagctatgtttaggtttaaaaaattgtgtttgatggcataccaagttaaccagtggcttaaactcc

SEQ ID NO: 737 - DNA, 371 bp, Human
gacatctgatactgcagaccagccttggctagatcctaggcgtcagagtgaaatcatgaatttccttttgtagattagaattgatggtccaactctcaacccaccaaagagaaacttaccttttccaatttaattgtaaaagccagatatatcactgaatgaaggtatctaaggaagtgatatttatcaacttcccaaatgatacagagaaggaaagcataattattaaaatgaacctaaagtctagatacagtgggccaggctggtgaagccttagactactatggaaatgacattgtttataagatgttgcacaaattatggtaatctgtgtcaatatttcaatgtgtgctggattattactgacatat

SEQ ID NO: 738 - DNA, 3585 bp, Human
caagggacttaccagtctggattcagcagtttcttttctaaaacccatttgggtgactcagcagccgcatctgctacctgattttatcctggagaatacagtgcaatatttctctttgattatttattcctcttgattgtggaattaatttgattgcttgctaatggtactagtagtactcctttcagaagaaaaaatggagcgatttaggtgaccaaatattacatacataaatagccacatgaagttttagacgtttggacttgaagcctcaaagatcaaccaaccagtccccttatttagtaaataaggaaattgaggctacacacagaaaattgtactacagattattactaataacccagcttgctaaattaggctatacctaggtaatctctagaagacaactctgacagactctttaatatttacccctggttggaacaatatttgaaatgtcccagatatttctatgctacttagatatttgtggcaaagcagaaagctttttgactgtgaaggcagaggtcagcactgggggaaacttgctggtggtctctcccacaaccttgcccagagtcctttccactaaggaggtgaagagaacagagaaagagatttccatttctgctgccagagctggtatttgcctgcctgattctctgtgtttcctgtttcaccgccaccctttcaggagagaactacaccagttcatcatgagggtcagggaagcaaaagctctcagatgtgtccagggcgttacttaagaaatgagtatgcagattctggaaggggtgtggaaaaggtgatcctttacccccacccaggaaaacctgcattgtgctagcatggaagaatcatgggctttggaattaaacccatttggtggaattaaacccatttggtttcaaatcccagttatgacatctgttaactttgcaaactcacaaaaattatttgaaattatctgagttttcattttctcaccttccagaatggggataatgcctcctgcatcggttgttgtgaggtttcaatgagatgaaatatgggaaagaagaggtactcacctgatggtccctgctttcctctgctaggcctgagtaggaactggaactctctaagagcattactcatactttttttttcttccaaggtagtttggaatgtgagtgcaagttagttctgcacatacagcccttctccaaatggtggtttcctttgaggtcttttacatgattatttatgactagagacaaacttaataagaactcaagaggattttaaatggagagaactcaagctgtagagaaaggaggaggcaacagacaggatatgtaggggcttacctagagcctggcacgacttctgagaagtcacccagcagaccggctagaggggatttgtgtgccacactctacttgccgggctgccattaaaatagaaagatataaaactgggtcaccaaaaaaaccaaacctcaaggctatccttccagagcagtagaaatgagtcccacagcctggtctttgagcagaggctgggaagataggatacatcactgtctggataccttctctttttaatagaatatattccgtatgattccctttccaccttaatggaaataatagctctctcctgcctgaacaaaagggattccaggtagtattgtggctaagagattacagcggacgatggaaggttcattttttagggaaggtgttgggtaggaagagtcacatttgacagaattcataaataatgtgtcctgaagtcagaggatgactgcaaagaaacacctcatgattccattaaatataaagagataaggagcaaggaggaaaaaagagaaagaattggtctttatttttcttgctaagaactctctggagtattgaaagacattgaaattatccctaaaattgtcacaacttttgtgaatactggtatacggttggaggtgtttttaaatctttatttcctctctttctttgttctagtgacttgtcttgctttaagattttttttaaagaattgttttattcaacatatatcaagttcttatggaatgccagtcatggtactagccccttgggatgtagtggttgagtgtgttcaatggaaacagccccagtatacaaagacagttcactctggtgtgctgtaggattggaaagggagtggtaccagatgaaaatgaaaccctaaagaagactgctgggccatgagttgcttcctcctcctccaccttaaccctctgattccagaattgcagtcattttcttctgccaaggaaatccattaaaaactgcagccacactgcaatttcctaatgtagaacaagatataaagcaggctttgagacaacaacctacctttgtttactctttccaagctggaagagtccttctcctctagttgcccctaggtcactggctaatttattttaaaatttagatggaactcatgtatagttaagtgcacaaatcttagccgtgcagatgggtaattttcacatagctatttgcccacatccgtgcctctaagatagagacatacactgttttcagcaccccagaaagttcccacatgcccatggtgccattttgtgaaaggtatttataaggcccttcaaatttgtggcttcctttctcatacttctcaggtataatgaaagggggagaaaaaccccaccatcaacacaaaacaaggctataaagactgtgcaccttttaacaagtcaatttgtagtcagtccctgggcctgtcttttttttttttaaattttgaagctacctgaggtttagaattccttcagccctagctgcttttattctgctttttatttaaacaaaaagagggggaggatctgaaggaaactagttttctgtacaaaggctttgaggtccatggactatacttgtcccatttatcatcccaggtggtgctttgaccctgccataccctggctattaagataaaaagatttgtggacattaaaattatgaatatgtcagtaataatccagcacacattgaaatattgacacagattaccataatttgtgcaacatcttataaacaatgtcatttccatagtagtctaaggcttcaccagcctggcccactgtatctagactttaggttcattttaataattatgctttccttctctgtatcatttgggaagttgataaatatcacttccttagataccttcattcagtgatatatctggcttttacaattaaattggaaaaggtaagtttctctttggtgggttgagagttggaccatcaattctaatctacaaaaggaaattcatgatttcactctgacgcctaggatctagccaaggctggtctgcagtatcagatgtccaaactcatctactattagccatattttgtgagtcgtttgtctaaactttgtcaaaaatgcctttgccatgattttgttgctatctggatttcaaacatggacagttaggaagatgtgcattgaagtaggaaaattttgttcagatttgctgttatttattttttaaattaaaaatggaaatgtattttaaagtttaaaaaaa

SEQ ID NO: 739 - protein, 44 aa, Human
KGLTSLDSAVSFLKPIWVTQQPHLLPDFILENTVQYFSLIIYSS

SEQ ID NO: 740 - DNA, 1595 bp, Human
ggcagttggcggaagagatcgagctccctggctgccggctcgccttctgcgtggagttctcgcggtctgggtttcgctgtctgctcttggcccggggtcattttgtcggcgtcgggtgccctctcttgcccagctggggcacagcgaggcggccccttctcccgacgacgttcgatggagtagggtcccagaccgttgtcccgaagagcgagatcgagcttggccccctcccccccctccttccctccctccttccttccgccgcaacatggctaacaacagccccgcgctgacaggcaactcgcagccgcagcaccaggcggctgcagctgcggctcagcaacagcagcagtgcggcggcggcggcgctaccaagccggcggtctccggcaagcagggcaatgtgctcccgctctggggcaacgagaagaccatgaacctcaaccccatgatcctgaccaacatcctgtcgtcgccttacttcaaagtacagctctacgagctcaagacctaccacgaggtggtggacgagatctactttaaggtcacgcacgttgaaccatgggagaaaggaagcaggaaaacagcgggccagacagggatgtgcggaggggttcgaggtgttggaacaggaggaattgtttctacagcattttgcctgttatacaaattatttaccctgaagttaactcgaaagcaagtgatgggtcttataacacacacagactctccatatattagagcgcttggatttatgtatataagatatacacagccccctacagatctgtgggactggtttgaatccttccttgatgatgaagagttcttcaccctctagcttcttccaaatatcagtattcccacttgcatagaagtgcagaattgaagagttgggtgttacataaataggctaagtgtttggatgacttgttcaaggtgacaaaattttaattccagttttctgactcctagtacaccacacacacctttaaaaaagaaattttttaaattgtaattcgagtctccctaatttgaaatctgaaatactaagttagatttaaatcgtgtatgcattggctgggcgtggtggctcacattgtaatcccaacacttcgagagttcaagaccagcctgagcaatatagtgagacctcatctctacaaaaaaaagtttaaaaattagctgagcatagaggtatgcatcttagtcccacctacttgggaggctggggtgggaggatcacttgagcccaggagacagaatttgctgtgagccaagatcattgccactgcattccagcctgggtaacacagtaagaccctttctcaaaacaaaacaaaatatcatatatgcattaatttacttgcatggtgaagtccaacatgtcaaaaatgaaatgatgagctgtattgtccctatgtctacccagtctactactttgtgttttaaggttcataagactttttgagtgctatgtgtcagtagtctatttacagagttcatccaaagaatttattgaattaaaggatggttctaatggaaatctattgtgttttgttattacatgcacacctaaaaaaaaaaaaaaaaaa

SEQ ID NO: 741 - DNA, 467 bp, Human
ccccccagtgctctaaggacaaggccctgttgtgcccatgtgccatctgcccttctcctgccctggtccatggtgtctatgactgctctgtgacccctgcccccaccagctctgcctgccgcagagggacagcagcccttgtgcaagctggcttcagccgtttcaggtgtggtctctaggctgggagattttgcgacctgccctggccactgctgatgcgtccagcctcctctccaaggtggaaggcagggaggacagcaggctctcttagacccatacactccacgttaggaaacacggagtttgaaaaataaaaacacgttaatctactggcaaaagcagctggcagaagctaaaatcactggcctaggaagcacttcaaaatcaacaacagggcttaggtgaaggagttattgggtatcacagagcaagaaaaaaatcatgggtacgtggtctcaggacctctt

SEQ ID NO: 742 - DNA, 1577 bp, Human
ggaaactacgaggcaagaatatccaagaaaaatctagaaaagaagaaacctgagtgagtcagcatgaccaaatattaaaacatcttataaagctgcaataattaaaacaatgtggtgctgatatgtggagggtcaatggaacaagatgaaatggccaaaaataaatttaaaatacatgttgaaatgtattaacagcatatgttaaagttaagttgtgttaactttatatgttaaattcaagttaattggtgaaagatggattattcaatatatgatgaacaactctgtcacgcagctaaaaaaaattaagctaggtccatatgccagactagataccaaaataaattccaggaggaccaagtttttaaaagtaaaaatatggaatcatggaagtgcatgaagaagaagtagcacttaaaaaaataataatctcagcatggggaaggtctaagtatggccctcaatcagaaaccaggaaggaaaatattgactattttaaacaaaattatctctgtaccaaaaacagcataaaaggtcaagaaacaacacactggaaaaagaattgcaatgaatatcacagccaaatagttaatttcttattttcaaaaaatagcttctacaaatcgaagagaaaaattctaaggtctcaaaggaaaaatgagcaaaggatttgacaggtggtagaatacagaaaaagaatttaaaatagctcctaaagatatggaaacattactcatgatagcagaagtatcaattgacaaaattactcagattggtaacaaactttaagggggaaagcacttccatgcattgctgtaaattggtacatcttctactgagaacaatccggcagtagttaacaaaattgtgaatgcatatatctctttctctagaaatttctcttttgggaatttattctacatatatattcaaacatgtgtgaaatacttctatacaggtgattgaatttcactttattcctaagagcagaagactgcaaaatagtaaatatatacccaaaagggtctaatggattagtttttggcatatcagcacatgataatactatgaagccataaaaaagagagatctctatatgtattgatgggggaccatctttaagatatactgtggtgttgaacaaaacaacatgctgaaaatgtctcttattcttttagaatcaatataagtctgtgcttgtaaatgcagtaagtatctttggaagtatacctaaaaattggtaatagtgtttgactccagggaagaacagatgggtgccagagtgaaaaaaagatagcttttgctttttatgacttttggattctgtaccacgtaataattttgatgtaaattttgctgtgtgtgtttttacttgttcatgtagtgattttataaattactcttttaattttctatcaatgaatatcctgggataaacccctcatgatcataatgaataatgatgtgtggagagtggggagggtttacatatgaaaaatgtagaaaatacaaaaagtgtctatatatacaaaaatgtaagtgttaacatttttatatttgcttcaagcttttttttt

SEQ ID NO: 743 - protein, 95 aa, Human [sequence omitted]

SEQ ID NO: 744 - DNA, 2276 bp, Human
tggccttaggtgtacacacacctggcactttgcttgacacataataggtggaccacaaatatctactaaatgaatatttgcatatagtaatattttaaggtactaaaagcagctcaaagtaaatatattaatatattaattccattgctatctggataaccactcaactttcctgctgaaaatgcccatttaattaaagaaggttggatagagctctctatatgcattttggacaggcaggggtttcaggtcataaacattctgatgagttaatataaaatgagagaaactgtaaatttccactactaaaaatcacaaaaataacagaaacaaaagaagagataagaatttggggaattgtgctgaacaatttagtggttaaaaaaaacaactgtgcatgtttagacttaaataagcccccatccaagtgtgaggggtccagtaatttttcaaaacatatgaaagtgttaatacattttgacaaaggaccattaaaaaagtcctgaattctgacttgagggaggaaagtaatgactaatacattctctagagacttgcagactttgggaattcataaaggaatggatgataattattaactgttgctggctgattgcccagacagttctcaacagccctgtacaagtctctgggtttgggatggatcaattctgagactggaaaatggccaaatctttgcaaatgagaaatatttttcttataagttcttattgtaggcaaataattacatagattattcatcagagaatttttaaatgctcataatctcaactctttcatttacaacttgtatttccaatagtttatgggtcatctctgcatagatgtcagaagtcacctcaagtttagtgtgtccaaaatctaactcacaggtctgtttctgacctcccaacttgctttccttgtgtttttcctatgctaatgatccaccataatcaaaataattaacatttatccagtgcctactatgtactattccctgtcctgttttacatttactcatttaaagtccataagaaacattaaatctcatctgccttctgaagaagatacaaccatgctctcttttacaaagtaggaaactgggtcacagaaaggtgaagtctttaaggctgaatcacagtagctcatcctagtaaatagaaaagccaggattcaactccaggggctgggtgcagaactgctattcttcactgcttcaccaatcagcagctacccaaggcagaaaactttttcatccttggctccttcattctccctgtcaccccagatcccctctacatctagtcagagaataggtcctgtcaattccaacttctctatatggctcctctcaggcatgtgcccttaattggcctaattctctaatacaccttccctctacatgctcactccctcagatcattgctttatcacgtgttacctgggttgctattacataaagagcaatctttctaaaatgaggatcttatcacttcacttccacactaaaatgtttttcctggggaaccacactccttagcaatctgacccatcagaccttccaggctgtctcctgcctgctccctaaggctccagccacacagaattatcatgggcccacacacccaccaaatcctcccatgcctttgcccatgttgtctgggatgcccttctctcccttctgtctacatcaagcatcagactgaatatccctcttgtgcggccttctaaaacctcccgtccaaagcgaaatatattgccctctatttatacttttacagcatttggcacacaagtacagagtagtagctttttatcacattctctgataattatatagatatggtatttcttagctctctctccaactggctaataagttgctttttgtctgagtgcctaattttgtgttttgtgtctgagtgcctcagttcctcaaaaaaaggttttttgattagttcattattcatttgaacatggaaattatgctcactagtggcaaatgccactaaccgtattccagaagctaggtgtcatgtttgcaataagatatattatcccttctacaagtcaccttttatttcaggcatttgtaaatgcccattaataaagtatggttcataaattttaccttgtaagtgcctaagaaatgagactacaagctccatttcagcaggacacaataaatattattttataatgcaaaaaaatctatgtcggtgcggagaaagaggtaatgaaatggcaggaattcgatatcagctatcatacct

SEQ ID NO: 745 - protein, 12 aa, Human
MKWQEFDISYHT

SEQ ID NO: 746 - DNA, 383 bp, Human
  unsure 46: unknown base
  unsure 47: unknown base
  unsure 48: unknown base
  unsure 49: unknown base
  unsure 51: unknown base
  unsure 52: unknown base
  unsure 53: unknown base
  unsure 54: unknown base
  unsure 55: unknown base
  unsure 56: unknown base
  unsure 57: unknown base
  unsure 62: unknown base
  unsure 65: unknown base
  unsure 67: unknown base
  unsure 69: unknown base
tggagagttgaatgccagccaccagccatgggtgccagagtttgtnnnntnnnnnnngaaancanancnagatcacctctgcagcctgcacagccgggcctttggactcctggatgctagagtgacctgggcgctgaggagggcccccgagccagtaccaggaaaggatagactcctgcttgcagcattcccagcagaggcatcgcctgtggacaccgcgtctgtgtctgtatatggcagagctcccagatatatgcacaagggagtgaaaaaatgtgtttgcaccccagtctctaaaaattcaacagcctggttacttctgggtggtatatcgtaggtggctttaatacgtgttatttgctcatctgtatttcttactcttt

SEQ ID NO: 747 - DNA, 488 bp, Human
  unsure 100: unknown base
atatagagccatctaatgccattttacctcattcaactcttttttgtaagaaatgtgtctttttaaatttttataagacttctgttaactaggcagtgcnatggaaagaaaggaagctgctgtaaagtgtgcagcacttctaagtggagggaagcaaaataaatttagctttaacaagtaccccagagggaacattcgtgctttaaacaatgactttacacataatactgtgaagagagcaacacgttttttgtaagatactgttatgaagaattcctggcaaattaccattctcactttattttggggcatcaaaaacaactaagtatttgattatgaccacaaaaaattcatctcaggagtcaaatgtgccttggccttaaaaattatgtgcttactattgtgaaacaatcctgtttctcatcccagattcagaatgcctaagaaataatttttagtgtaagaagtatcactccaatttagtcatt

SEQ ID NO: 748 - DNA, 2062 bp, Human
gtcccaggtgctgcccacctacgacagcctggatgagccgtcagtgaaaaccatgagctccatatttgcttcctcccttaatgtggtcaccaccttctacgtcatggtggggtttttcggctacgtcagcttcaccgaggccacggccggcaacgtgctcatgcactttccctccaacctggtgacggagatgctccgtgtgggcttcatgatgtcagtggctgtgggcttccccatgatgatcctgccatgcaggcaggccctgagcacgctgctgtgtgagcagcagcaaaaagatggcacctttgcagcagggggctacatgccccctctccggtttaaagcacttaccctctctgtggtgtttggaaccatggttggtggcatccttatccccaacgtggagaccatcctgggcctcacaggagcgaccatgggaagcctcatctgcttcatctgcccggcgctgatctacaagaaaatccacaagaacgcactttcctcccaggtggtgctgtgggtcggcctgggcgtcctggtggtgagcactgtcaccacactgtctgtgagcgaggaggtccccgaggacttggcagaggaagcccctggcggccggcttggagaggccgagggtttgatgaaggtggaggcagcgcggctctcagcccaggatccggttgtggccgtggctgaggatggccgggagaagccgaagctgccgaaggagagagaggagctggagcaggcccagatcaaggggcccgtggatgtgcctggacgggaagatggcaaggaggcaccggaggaggcacagctcgatcgccctgggcaagggattgctgtgcctgtgggcgaggcccaccgccacgagcctcctgttcctcacgacaaggtggtggtagatgaaggccaagaccgagaggtgccagaagagaacaaacctccatccagacacgcgggcggaaaggctccaggggtccagggccagatggcgccgcctctgcccgactcagaaagagagaaacaagagccggagcagggagaggttgggaagaggcctggacaggcccaggccttggaggaggcgggtgatcttcctgaagatccccagaaagttccagaagcagatggtcagccagctgtccagcctgcaaaggaggacctggggccaggagacaggggcctgcatcctcggccccaggcagtgctgtctgagcagcagaacggcctggcggtgggtggaggggaaaaggccaaggggggaccgccgccaggcaacgccgccggggacacagggcagcccgcagaggacagcgaccacggtgggaagcctcccctcccagcggagaagccggctccagggcctgggctgccgcccgagcctcgcgagcagagggacgtggagcgagcgggtggaaaccaggcggccagccagctggagggtaaggcctccgccctacagccgcctgcctcaggcccagggagcggcagccccctcccccagccctggggtgatgcccaggtcatcctcgggagccctgccaggccccccttctctttccagccgcctgctgagcagacccctcggagagctttctgctcccttcccatcagcagcttgctttctgggaaccttttatctgccttactcccctttaaacacctgcggcatcgtcacatggcttgtgattaccgttttatctcccttgctcccctttaaaacacctgcggcattgtcacttggcttgtgattaccatttcgtctttaaagcaggtttgttaacagttttaacactcggagtatttaaagccagccaggtgtgggcgtgcctgcacccagatgtggaggtttattttaaggctgtgccccaaggggacccagtttgggggtggctgtgcccgccctggtcctagcatagccctggcccagagcactgctcccacaccctcgggcctcggagctcggctgtgttcatctacagggatctgtcacctgtccctccaggaaagctccttacgcctttgctctcctgagaataaaacttgctctgaatcctcctcc

SEQ ID NO: 749 - protein, 555 aa, Human
MSSIFASSLNVVTTFYVMVGFFGYVSFTEATAGNVLMHFPSNLVTEMLRVGFMMSVAVGFPMMILPCRQALSTLLCEQQQKDGTFAAGGYMPPLRFKALTLSVVFGTMVGGILIPNVETILGLTGATMGSLICFICPALIYKKIHKNALSSQVVLWVGLGVLVVSTVTTLSVSEEVPEDLAEEAPGGRLGEAEGLMKVEAARLSAQDPVVAVAEDGREKPKLPKEREELEQAQIKGPVDVPGREDGKEAPEEAQLDRPGQGIAVPVGEAHRHEPPVPHDKVVVDEGQDREVPEENKPPSRHAGGKAPGVQGQMAPPLPDSEREKQEPEQGEVGKRPGQAQALEEAGDLPEDPQKVPEADGQPAVQPAKEDLGPGDRGLHPRPQAVLSEQQNGLAVGGGEKAKGGPPPGNAAGDTGQPAEDSDHGGKPPLPAEKPAPGPGLPPEPREQRDVERAGGNQAASQLEGKASALQPPASGPGSGSPLPQPWGDAQVILGSPARPPFSFQPPAEQTPRRAFCSLPISSLLSGNLLSALLPFKHLRHRHMACDYRFISLAPL

SEQ ID NO: 750 - DNA, 447 bp, Human
caattttgccattctagaaactattttaggggagaaaaatcttccctacaaaaataaacttaaacccatcaaaattataaatattataactttttacttctgccatttaaaatgctctcctgcaataccaccccttcatttaacatccttcctgtaccatcacatattgaagagaaaacagtattacagcaaagcttagatagtttaacataatgatttgtacaatgattcttaaaaaatctttggccttagtggccttttttcttcacttacacattaaaaatgctgctgcagtaaccagtgtttgggaaaggacatcagtcttcaagaaccataaactgacagaatttcaatacagtaggtttccaaattgcaatttgtagtgcacatgacagtaagcgaggttttgggtaaatatagatgaggatgcctattcagacaatctac

SEQ ID NO: 751 - DNA, 2124 bp, Human
gcccggctgctccatggcgctgtgcgaggccgcgggctgcgggagtgccctgctctggcctcgcttgttgctcttcggggactccatcacccagaaaatgtgatgttctgaatcgtggattttcaggttacaataccaggtgggccaaaattatccttccaagattaatcaggaaaggaaacagtttggacatcccagtagcagttacaattttctttggggccaatgacagtgcactaaaagatgagaatcccaagcagcacattcccctggaggagtacgctgcgaacctaaagagcatggtgcagtacctgaagtccgtggacatccctgagaatcgagtcattctcatcacgccgaccccactttgtgaaacagcctgggaagaacagtgcatcatacaaggttgcaaactaaatcgcctgaactctgttgttggtgaatatgccaatgcgtgtttacaagtggcccaagactgtgggactgacgtacttgacctgtggaccctgatgcaggacagccaggacttctcatcttatttatcagatggactacatttgtctccaaaggggaatgaatttttgttctcgcatctctggcctttgatagagaaaaaggtctcttctctacctttgctgcttccttactggcgggatgtagcagaagcaaaacctgaattaagtctgctgggagatggagacaattagccaatcacaggagacccaaatctgcttgttatctacagaactcaaagttgtcaatacgtagaggtacgcttttttcctcaggcttaaacctttgccactgatattaataataaaagtattagatgatttttcagggaagttttatacttaggtccattgtgtttcgacagtatttattaatgcagatatcagtgctacagctataaaatataccctgagcagcttgttaattctataaatgacaaagactatgtttttaaaaagtcacaattttataaaaatggtttttcttacattcttttgagaactgtttcactcatacatacacccacacaccccactcaaccttgtatcaaattccaaaagtgtaactaaagtataagaatatcatgactagttaaaagatagcaaataccataaggtacaagttcaagtattagtataacaagtatctgagcaacaaatgtccttggaaatggggggtaggaggagatatgattagtcacaggtttggttaactgccctcaaaatttacaagttaaaatgttttggctggtgagcacatttcagttcttagggaaaaaaaagcttttaatggcaatttatagaaatcagaatccaggctaatgatttttatccttcacacagtaaatgcagcccatccagaatcctggagcaataaagtaagaagtaattcaaatatctgcttgtgggtcaataaaaagggtttctgaagtatcaagtcttgtggggacagcccccaaccctaagggcaggtagtattctatctcctggctggctcatcacattcaaaacaacctgtttttttttgttgttgttgttcttgttaagaaatatctcaccctcttattcaatagtgtttgaaaacaggcaatctttgtattttaaatagtctaggtttgtagatagtgaattttttttttttttttttttttttgaggcagagtctcactctgtcacccaggctggagtgtagtggcgcaacctcagcctctccaagtgctgggattacaggcatgagccaccactcccagccaatagtgaattttctaagagcatgtatccctatcagtaacagggatacatgaagatacttataaaatacagaaaaactgcccagcaaatcagggccctaaacagttggtagattccataaattcaactggctaccatgtatagccctcactgtaaggtaggtggttaggtttctagagagcattagtcttagaattatgaagagccatattaacccaaacgatttctaaatttagatatatattttccctgctacataaaaactctgggtaataactagaaatagacccacaatttagagacaatgtatactagatttatctcctttgtttttagttgaaggcataaaaaaaaaaaaaaa

SEQ ID NO: 752 - DNA, 5571 bp, Human
ctgctgcggcggcttcttccgaggcgccagcggcgagtgcgactgcagagcccgaggccggggaccaggacagtcgcgaggttcgagtgttgcagagcctgcggggcaagatctgtgaagcaaaaaatttattgccatatcttggaccccacaaaatgagagattgtttctgtaccataaatttggaccaggaagaagtttatcgtacccaagttgtggaaaaatctttaagcccatttttcagtgaagaattttactttgagattccaagaactttccagtatttgtctttctatgtttatgataagaatgttttacaaagagatctccgtataggaaaagtagccatcaaaaaagaagacttgtgtaatcacagtggcaaagaaacttggttttcattacagcctgttgactccaattcagaggttcagggtaaagttcaccttgaattaaaactgaatgaactgataacggagaatggaactgtatgccagcagcttgttgtacacatcaaggcatgccatgggttgcctctcataaatggccaaagctgtgacccttatgcaacagtttctctagtgggcccttctaggaatgaccaaaagaagacaaaagtaaagaagaaagcaagcaatccgcagtttaatgaaatcttttattttgaggtaaccagatccagtagctacaccagaaagtcccagttccaggtagaagaggaggacattgaaaagctagaaatcaggatcgacttgtggaacaatggaaacctagtccaagatgttttcctaggtgagattaaggttcctgtgaacgtattaagaactgattcctctcatcaagcctggtacttgctacagccaagagacaatggaaacaagtcatccaaaactgatgacctggggtctcttcgattaaatatatgttatacagaagactacgtgcttccttcagagtactatggtcctttgaaaactttgctgctaaaatcaccagatgttcaaccaatatctgcctcagctgcttacattttgagtgaaatatgtcgagataaaaatgatgctgttttgccccttgtacgactgctgctgcaccatgataaacttgttccttttgccactgctgtggctgaattagacttgaaggatacacaagatgcaaacacaatttttagaggaaattccctggctacccgatgtctggatgagatgatgaaaatagtgggagggcactacctgaaagtaacattaaaacctattcttgatgagatatgtgactcctcaaaatcctgtgaaatcgatcctattaaattgaaagagggagataatgtagaaaataataaggagaatctgcgctactatgtagacaagttattcaatacaattgtaaaatcaagtatgagctgccccactgtaatgtgtgatatcttttattctctaaggcagatggctactcagagatttcctaatgaccctcatgttcagtattctgcagtgagcagctttgtatttcttcgtttctttgctgtagccgtagtatcacctcatacttttcatttgcgacctcatcatccagatgcacagacaattagaacattaactctcatctcaaaaactatacaaactttgggaagctgggggagtctgtccaaaagcaagtcaagtttcaaagagacattcatgtgtgaatttttcaaaatgtttcaagaagaaggatatattatagcagttaaaaagttcttggatgaaatttcatctactgaaactaaagagtccagtggtacgagtgagcctgtgcacctgaaagaaggtgagatgtataaaagagctcaaggaagaactcggattggaaaaaagaattttaagaaacgatggttctgcttaacaagcagagagctcacctaccacaaacagccaggtagcaaagatgcaatctacacaatcccagtaaaaaacattcttgctgtggaaaaactggaagagagctctttcaacaagaaaaatatgttccaagtaatacatacggagaaaccactctatgtccaggcaaataactgtgtagaagctaatgaatggatagacgtactctgcagggtgagccgatgcaatcaaaacaggctcagtttttatcatccctctgtgtatctgaacggaaattggctctgctgtcaggagactggtgaaaacactctcggctgcaagccatgtactgcaggtgtccctgcagacatccaaatagatattgatgaagacagagaaacagaaagaatttattccctttttaccctcagtttacttaagctgcagaagatggaagaggcttgtggaactattgcagtctatcaaggaccacagaaagagcctgatgattattctaactttgtaatcgaggattctgtaacaacctttaagacaattcagcaaataaaaagcataattgagaagctggatgaacctcatgaaaaatataggaagaaaagatccagtagtgcaaaatatgggagcaaggaaaatccaattgttgggaaagcatcttagagtttaacagattggttcagaagaactggaaaatattatttttcttggagcttttcaattcatcatgtattttgttcatggtatttaagaatgagcatccgcttcaatgtcatctgcctccacattgtatttaatatttaataattgaaattaattgtttgggaatcctggtattgatgtattactagagaatttaaagcccaagattcccttcatacctgtgtgaccaaatccatgtttctgcaacttctttttaatcgaaagaatcttcctagaaaagctttgtaacaaagggagaactcctccgtagcaagaaaccatctcttcttgtaacactctgttctgtggacttgttttcactaccatcagtgcctgctctatactgccaacattgtgttttactagaaaattccaattcatgacagttcagagcttttcatttagttcatgtagaccctcccactttaaaaaagaaaaaaaataagaagtgtttttcctttggtccatcagtcattacaggttccattcaagacagtgatagaaactttagaaaactgccagagcatacttgaaagttggtagatccttttgcctaaagatgtaaacaaaactcaagacagaaggaatcagggaatatgtgctattgtgtgcatcttgtttacatttgggatcagtgatggcaaaagaagtaatgagaccactgaaattgttttcattgttttaaataccaggtactcattttcttgatttgaaagtttaacatgacttctaaggacatctcttcaaaaagaaagtaaacagggaatgaaggtggtgggaaaatcacttcacttcacccactatttcatgttgtaataagggccaccataaggatgccctcctcatagtgttcggttctgatcttcctcgagaacagtcacttggcgcactttaataatctggactgctccagatttgactttagatactccatggtatctagtctttatgatcagttgaatgatcagtgtttaagtctaaaaataatgctttcctgaaaatgtttatatttcattgctgtttccttattgcctgctagccaaatggaatttgggcaagcaactctttgaagacttttttaccctagaaatttacttttgtcctaaaaaccctaactgtaaataagcagtcgaagcaagttgccaccttgaagttgagggatacactttgcttcatcagtattaaaaaccatggtactcttattttgtcttttttaattcaaaacattttctaaatgtggtactttgaaccttggagtatttacatgtttctgttcaaaactgtgacttattaatgtaagtctgctagtagtactttttttgtctgagcataagctatatttcaagatatactttgccaattttgttattggtgggtaatcatttttaaattatattgttattaggtaattatttttaaagactactggcatacaatcaaagttgttccataaaagaatataactgagcaatgtatttctctaaatgacttgtaaaaatcaatgaattatgtttaagtctgcattatggtaggttattactcccagctcattttaaagacaagtttgaaagagtcctttaaattttataagcttgtagattccataaactacactgatttatacatttgaaagaatttagccatttaataaatttcttattctcaaattgcatttagattaaaattccttttaagagtgtctgaaatgtctgcctgcgaagaacatgtaaacatgccagataccagtcattattctttagtggctttttagtcctctgcttttttttttaaggcaaaagaaatatgcatctagcatttctaataccaaatccccaattgtgattgttttaaagatcatggtatgatcacagggaccaaggctgtgtgcatatataactctggatttgaaaggaggagagttcagccatctagttcttttcttcacatgacacttttaaacagccagtttgactggaattaaccaacttggcacagcctaaaaaaggagtaatgtgaaattaaattatttttctttgaaagtcttttgaaataagagaccatgtaagtaggaccctaagacaaccaaggaatttgcttccagggccctcattcctctgctgttacttacaaatgttttaatttttactacctgatattctttctctaccttttccacatttgaaaatatacaaggcagctcacttcatcctaaaaacctaaaaactccaggaaggaaagaaaaggatgatatggggaaatttgccataaatgccggttctggttcttagtttagccatttccatcagttgaaattgtggtgtgatctgttgcttgtttcgttgttgttttgtttttgtgtagctttgttttttaatattcatttaataagatgatgggcaatagcaaacatttttactcccaggaatataatttatcaaattgaactattttatttgcccaaagaaacttgtttttaatatcacgggtaatgggtaagtgtgaaaactaggcttttttttatgaaacaaaaaaaggtgacgaataatatggcttttgtttctgtttctgaagcctgatttcatttatgccaggttttgaaaaacagatctttttcttaagtgaaagcacctttaatttgctctaacggtacatcctgtaaagacagaattctgcatagccttttaggtgtttttacagtatgtgaaaaatacaagactcattctagagttaaattaccaatcttggttgatattatctgcttccatttttattaatttggaaattaatatgttgctagtaaatattggtttttacagtacccagtttgaaaatgtaagttatcaaaacttaatgtagtgaatttgtgtaaccatgttgtattgttgagaatgtatttttatttaaattttattttcttatcaagagtattataaaaattaacttttgtaactgtcgcttggaaataactcaaataaattacaagaagcctgtcaaaaaa

SEQ ID NO: 753 - DNA, 1136 bp, Human
caattctatgactgaaagtgactaaaaagctggctttatgccattaacactctgtactttgcagccaatcagaactgacgcagtctgggtgctagctgcttcaaaagcaacccacaccacacttttaccatttccatacatcaactgctgagaatatgaaaatgcacagtgacaggttttaggatcctgcttcaggatttccttttcctggtttggtcactagagttggctatttatctgtttctaaacaatagctattttatcgaatagtttagagaccactattaaatattgtgactgatgaaggatctgtgaatttttttatatatgttctaagagttaccattttgataccttttaaaaaccagcagctttctactatattcatgtaaaacagcatgaataaaaccattttttgatacagggttttatttggctttaaactcaggaaccaagttaattatgccagattgaactttgatttttactaccttttcaaagatattttaaaaagtggattactacatatgatttctttggagcttacatttctttacttcacgaattctatgtcactgttacaagtttccattctgatggcttctgggcctttgtacctttgtttttggtgccttattcctagtatgtttctatcaccttaatgaggccgcagatggagtcagaatgtgaaattacaaataatcactggatccatctactgttttccatcaccttccccactgatgctctgggcgagagagtgatgtgtcacttcaactgtgtgtaatatgtcagacacgtcctacaataacaggcgtcatatttgtattatttttagtttactgtagaaaataatgtcaccgccaaaggtgatgagagtcacgttttgtaggatctgttttcttatacttaaagacagacttctgctacggtaattgccagtattcatggcttcctttctgtgtcagaagagaagggatctgctttctcttggctgatttcacatagcattggtaatagacatgcatttctctttctaaaggggagtaactttttaaacccttcctgattttagcctggcaatgtaagtgtccttaatgtgactgttttgataattaaaaaaaggtatataattt

SEQ ID NO: 754 - DNA, 1419 bp, Human
  unsure 214: unknown base
  unsure 215: unknown base
  unsure 216: unknown base
  unsure 217: unknown base
  unsure 218: unknown base
  unsure 219: unknown base
  unsure 220: unknown base
  unsure 221: unknown base
  unsure 222: unknown base
  unsure 223: unknown base
  unsure 224: unknown base
  unsure 225: unknown base
  unsure 226: unknown base
  unsure 227: unknown base
  unsure 228: unknown base
  unsure 229: unknown base
  unsure 230: unknown base
  unsure 231: unknown base
  unsure 232: unknown base
  unsure 233: unknown base
  unsure 234: unknown base
  unsure 235: unknown base
  unsure 236: unknown base
  unsure 237: unknown base
  unsure 238: unknown base
  unsure 239: unknown base
  unsure 240: unknown base
  unsure 241: unknown base
  unsure 242: unknown base
  unsure 243: unknown base
  unsure 244: unknown base
  unsure 245: unknown base
  unsure 246: unknown base
  unsure 247: unknown base
  unsure 248: unknown base
  unsure 249: unknown base
  unsure 250: unknown base
  unsure 251: unknown base
  unsure 252: unknown base
  unsure 253: unknown base
  unsure 254: unknown base
  unsure 255: unknown base
  unsure 256: unknown base
  unsure 257: unknown base
  unsure 258: unknown base
  unsure 259: unknown base
  unsure 260: unknown base
  unsure 261: unknown base
  unsure 262: unknown base
  unsure 263: unknown base
  unsure 264: unknown base
  unsure 265: unknown base
  unsure 266: unknown base
  unsure 267: unknown base
  unsure 268: unknown base
  unsure 269: unknown base
  unsure 270: unknown base
  unsure 271: unknown base
  unsure 272: unknown base
  unsure 273: unknown base
  unsure 274: unknown base
  unsure 275: unknown base
  unsure 276: unknown base
  unsure 277: unknown base
  unsure 278: unknown base
  unsure 279: unknown base
  unsure 280: unknown base
  unsure 281: unknown base
  unsure 282: unknown base
  unsure 283: unknown base
  unsure 284: unknown base
  unsure 285: unknown base
  unsure 286: unknown base
  unsure 287: unknown base
  unsure 288: unknown base
  unsure 289: unknown base
  unsure 290: unknown base
  unsure 291: unknown base
cccattctcttcctctacctcactccatctgataaaaaaccattctaaatctcatgttcattattcccatgctctcctatttctatcatattaatgtatctacatgttttccttaaatatgtttttatattagttttaactataagttaaagaccatattgttgtagataattttttttagtactttctcttcatgttgtatttctaagattcnnnnnnnnnnnnnnnnnnnnnnnnnnnnnnnnnnnnnnnnnnnnnnnnnnnnnnnnnnnnnnnnnnnnnnnnnnnnnnaatgttttcctagctatcaccatcaaaaactctttccacagtgtgttgaatttttaatatgacaaaaatgaaaatgtaccaacaattttcagtgacttcacctccattctgaaatcctgatgtttccaaatatctctgaacacctcaagtcctagggacaactgagattatattaacattaatctctgaatgttgccaattctaggccttcacttggttcatgtaggaacaccaagtccctttcaaagcaccacatcttcctctaatcaatatttcttggagtccctagggaatgtcttacatgcattcaaacaatcaccatttctggagatacactacagggtcaccataaactctgctacccttaggttccatcactatggaagctgagtttcaccagaaggcacttttgtcctccattacgaccagcaaagccagctaagccacagctgctggcctcaaaaaatgtgatgatcaatccacactgctcccactggcctctgttacccttatcctggcctttgagtgcagggcatgatgtcctgcccgtactgagatgctgatctctgccagttcatgttcatattggcattaaaattttaaggtcccttgaagagggaggaggcaaatgtctctgtcttctatgtgatacattctgctgtttttttctctatggtgaaaatatgtaaaccggttttgggtaccaaccaccaggctgtatatggaggctctcctcctttctaaccctgctgctgatttggaattaccttgccaagcccctttgtgccttatagtgaactttctctaagggacctgtcatctcttatcattgtttatccattttctagattctgaacccaagaaagaacaaagttcaagattttccatgtctttgtaacacttagccctgtgcaaatcagagtatgtgagtggaagaaggggtgagtcctaactgtacatctcggatataacaaatgtgcaaattctgattgattgccctgtaaaatgaattattctcatgcagtgctctacttgacttttatctttgaattcacaactaaaaacccatagcccagaaatctaaaaaaagtaattttagtggagcctttgaaaataaaagaccattgg

SEQ ID NO: 755 - protein, 30 aa, Human
PFSSSTSLHLIKNHSKSHVHYSHALLFLSY

SEQ ID NO: 756 - DNA, 1486 bp, Human
ccgcggcatttatacctgagcaaatgtacgcacacataagtgcatatttactgcaaatctcagctaaagtcattattagctaaaggtctttaattaggcttagggttgttatccacatttcagatagtataaatactaccattcattaataatgttaagttacgttgctaaaaattgtttttacaccttaggttaggcatgtgcaggaattcaatggctacaggttacatggcattagtctggctttagctatatgatgaggaaaattaggaagtccattctaagatatgtcgtgtttggtaaggacattctaagcaaattaggaaggcaggtgcagggaagaaaaaacggtattcacacatcctcctccagaatatcacaagccaaatggatgcgggacatgtctacttgacaggactctgattttaacttcctggattgtaagctccaaagttttatacaggagttgtcaaacccagcagcaagcagcttgctatcaggggagatttctgcagtgttcaacagctgctaggtgttatagaagcagacggtagtgagggagggacacccatccttgacttgcttaatgcgctcctgtaagacctccagggcagcatcgttctgcagaatagggctgggcatatcaggggcctccaagtaattgttctcactgcgggaggagctgccacttgcatacagctgttagtctgttgtcttggcaggctgcacatcaagatgaataagtaagataaacattttgcacagggcagtatagctgtcactttggaggtagtggataaggtagttgtagctgtcttcttggagatggaccacgtaattgttatctaggaatgctcgaagcttgaagttagataggatgtcctggatggtttgagtggtctgtagctgctcaatgacgcccttctggctagctttctgcagaaacattccatggaagcggctgtaaaaactttccactgtacttttggactgttctggaccaggcttatatggaggcagacaaagagaggataaaggagaggcatcacttcgtggctatgcggggaatcagaatcgatgagaaaattccgcagtcgtccaaactgtacttcattgctggggctctgcctggcaagggactgcagacactatgtcggcacaatgagattctctgtgtaccgtgagattggccgccaactcttcagcagtctgtggcagccgcagtccttgcttcaggggaccgtctgagtccacgtactgccagcgtttgaggtagcaggacactgccatctggatctcctcggtacgcactcatttcatgactgaacatcccaggcggccccggctccccacgccgccgcctcccggatcgagatgcttccgcctccgtcgtctctgctgcaggtctcgctctgaccgccggctcagctgtgtcctggagccccgcgccccgccgccctcgccgccgctctgggcggccgccgac

SEQ ID NO: 757 - DNA, 319 bp, Human
  unsure 55: unknown base
  unsure 61: unknown base
  unsure 65: unknown base
  unsure 74: unknown base
  unsure 83: unknown base
  unsure 89: unknown base
  unsure 92: unknown base
  unsure 182: unknown base
  unsure 211: unknown base
  unsure 224: unknown base
  unsure 226: unknown base
tttgtgctgatccgggatggcttcctgctcccaactggcctcagctccctggccnagctgnctgnctgctggangatcattgnagttcnggncggccggctggaagacaacgccagctgcccacaagtattactacagcgaagtctccgactaggcctccagatcagggcttcctcaccagnactggcctttcttctacccacctctaaangctggcagtggantntctgcctcacccaaagacttttcccttccagactttgagtgtcttcccttctagactttcccatctcctggtgagatgtttcccacttatgcc

SEQ ID NO: 758 - DNA, 439 bp, Human
ctagtctcgagtctagagcggccgcgaatatgtgttgttatttatgactggattatgaagaatcaggagaatgcatttcatgtctgattctgctgctaattaagtcaatcatttaatttttgggacctcagtttctttgtaagtaaaataacacctgcttgttcttcatccctgggctgttgggaggaacagatgagacagtggctatagaagcacttggaaaatgcacttgtcctgttttgtaaaataaaaaggtattaaatgtgtatttctgccatgtacctaatgattattcagtgcgtatatatctgaaaagtcatgttgcaaatctttctgtgaaacagatgctattttaaattcactgggagaaatatcctatttaaagtaatctatagtaatttctttttatataataaaaatatatttgtaaagtcgacaa

SEQ ID NO: 759 - DNA, 2932 bp, Human
  unsure 1350: unknown base
  unsure 1351: unknown base
  unsure 1352: unknown base
  unsure 1353: unknown base
  unsure 1354: unknown base
  unsure 1355: unknown base
  unsure 1356: unknown base
  unsure 1357: unknown base
  unsure 1358: unknown base
  unsure 1359: unknown base
  unsure 1360: unknown base
  unsure 1361: unknown base
  unsure 1362: unknown base
  unsure 1363: unknown base
  unsure 1364: unknown base
  unsure 1365: unknown base
  unsure 1366: unknown base
  unsure 1367: unknown base
  unsure 1368: unknown base
  unsure 1369: unknown base
  unsure 1370: unknown base
  unsure 1371: unknown base
  unsure 1372: unknown base
  unsure 1373: unknown base
  unsure 1374: unknown base
  unsure 1375: unknown base
  unsure 1376: unknown base
  unsure 1377: unknown base
  unsure 1378: unknown base
  unsure 1379: unknown base
  unsure 1380: unknown base
  unsure 1381: unknown base
  unsure 1382: unknown base
  unsure 1383: unknown base
  unsure 1384: unknown base
  unsure 1385: unknown base
  unsure 1386: unknown base
  unsure 1387: unknown base
  unsure 1388: unknown base
  unsure 1389: unknown base
  unsure 1390: unknown base
  unsure 1391: unknown base
  unsure 1392: unknown base
  unsure 1393: unknown base
  unsure 1394: unknown base
  unsure 1395: unknown base
  unsure 1396: unknown base
  unsure 1397: unknown base
  unsure 1398: unknown base
  unsure 1399: unknown base
  unsure 1400: unknown base
  unsure 1401: unknown base
  unsure 1402: unknown base
  unsure 1403: unknown base
  unsure 1404: unknown base
  unsure 1405: unknown base
  unsure 1406: unknown base
  unsure 1407: unknown base
  unsure 1408: unknown base
  unsure 2345: unknown base
  unsure 2346: unknown base
  unsure 2347: unknown base
  unsure 2348: unknown base
  unsure 2349: unknown base
  unsure 2350: unknown base
  unsure 2351: unknown base
  unsure 2352: unknown base
  unsure 2353: unknown base
  unsure 2354: unknown base
  unsure 2355: unknown base
  unsure 2356: unknown base
  unsure 2357: unknown base
  unsure 2358: unknown base
  unsure 2359: unknown base
  unsure 2360: unknown base
  unsure 2361: unknown base
  unsure 2362: unknown base
  unsure 2363: unknown base
  unsure 2364: unknown base
  unsure 2365: unknown base
  unsure 2366: unknown base
  unsure 2367: unknown base
  unsure 2368: unknown base
  unsure 2369: unknown base
  unsure 2370: unknown base
  unsure 2371: unknown base
  unsure 2372: unknown base
  unsure 2373: unknown base
  unsure 2374: unknown base
  unsure 2375: unknown base
  unsure 2376: unknown base
  unsure 2377: unknown base
  unsure 2378: unknown base
  unsure 2379: unknown base
  unsure 2380: unknown base
  unsure 2381: unknown base
  unsure 2382: unknown base
  unsure 2383: unknown base
  unsure 2384: unknown base
  unsure 2385: unknown base
  unsure 2386: unknown base
  unsure 2387: unknown base
  unsure 2388: unknown base
  unsure 2389: unknown base
  unsure 2390: unknown base
  unsure 2391: unknown base
  unsure 2392: unknown base
  unsure 2393: unknown base
  unsure 2394: unknown base
  unsure 2395: unknown base
  unsure 2396: unknown base
  unsure 2397: unknown base
  unsure 2398: unknown base
  unsure 2399: unknown base
  unsure 2400: unknown base
  unsure 2401: unknown base
  unsure 2402: unknown base
  unsure 2403: unknown base
  unsure 2404: unknown base
  unsure 2405: unknown base
  unsure 2406: unknown base
  unsure 2407: unknown base
  unsure 2408: unknown base
  unsure 2409: unknown base
  unsure 2410: unknown base
  unsure 2411: unknown base
  unsure 2412: unknown base
  unsure 2413: unknown base
  unsure 2414: unknown base
  unsure 2415: unknown base
  unsure 2416: unknown base
  unsure 2417: unknown base
  unsure 2418: unknown base
  unsure 2419: unknown base
  unsure 2420: unknown base
  unsure 2421: unknown base
  unsure 2422: unknown base
  unsure 2423: unknown base
  unsure 2424: unknown base
  unsure 2425: unknown base
  unsure 2426: unknown base
  unsure 2427: unknown base
  unsure 2428: unknown base
  unsure 2429: unknown base
  unsure 2430: unknown base
  unsure 2431: unknown base
  unsure 2432: unknown base
  unsure 2433: unknown base
  unsure 2434: unknown base
  unsure 2435: unknown base
  unsure 2436: unknown base
  unsure 2437: unknown base
  unsure 2438: unknown base
  unsure 2439: unknown base
  unsure 2440: unknown base
  unsure 2441: unknown base
  unsure 2442: unknown base
  unsure 2443: unknown base
  unsure 2444: unknown base
  unsure 2445: unknown base
  unsure 2446: unknown base
  unsure 2447: unknown base
  unsure 2448: unknown base
  unsure 2449: unknown base
  unsure 2450: unknown base
  unsure 2451: unknown base
  unsure 2452: unknown base
  unsure 2453: unknown base
  unsure 2454: unknown base
  unsure 2455: unknown base
  unsure 2456: unknown base
  unsure 2457: unknown base
  unsure 2458: unknown base
  unsure 2459: unknown base
  unsure 2460: unknown base
  unsure 2461: unknown base
  unsure 2462: unknown base
  unsure 2463: unknown base
  unsure 2464: unknown base
  unsure 2465: unknown base
  unsure 2466: unknown base
  unsure 2467: unknown base
  unsure 2468: unknown base
  unsure 2469: unknown base
  unsure 2470: unknown base
  unsure 2471: unknown base
  unsure 2472: unknown base
  unsure 2473: unknown base
  unsure 2474: unknown base
  unsure 2475: unknown base
  unsure 2476: unknown base
  unsure 2477: unknown base
  unsure 2478: unknown base
  unsure 2479: unknown base
  unsure 2480: unknown base
  unsure 2481: unknown base
  unsure 2482: unknown base
  unsure 2483: unknown base
  unsure 2484: unknown base
  unsure 2485: unknown base
  unsure 2486: unknown base
  unsure 2487: unknown base
  unsure 2488: unknown base
  unsure 2489: unknown base
  unsure 2490: unknown base
  unsure 2491: unknown base
  unsure 2492: unknown base
  unsure 2493: unknown base
  unsure 2494: unknown base
  unsure 2495: unknown base
  unsure 2496: unknown base
  unsure 2497: unknown base
  unsure 2498: unknown base
  unsure 2499: unknown base
  unsure 2500: unknown base
  unsure 2501: unknown base
  unsure 2502: unknown base
  unsure 2503: unknown base
  unsure 2504: unknown base
  unsure 2505: unknown base
  unsure 2506: unknown base
  unsure 2507: unknown base
  unsure 2508: unknown base
  unsure 2509: unknown base
  unsure 2510: unknown base
  unsure 2511: unknown base
  unsure 2512: unknown base
atagcgttaccataggaaactgttccaaactgagttagctttaattataattattttattcataaatggtgatagtccccagatctgtacacctttatcactccctgccgtagatatactttaggttagtatttctacattcgtggcaagcattttggtaacaccagtggttttcattgtgacttttatcactatcactaagaatgcaatttaagttgccttttggcatcatagatcatagaaactttctctctgaatcatacccatgtgtgaattttcattttatatgatagtgtagcatattagaagcatattttaaaacagagcctttgagaaattgaaaaacaattatttgaagttcaccatagtaccttaaaggaacaaagagaatgtgggataggagtaacttgaattcgtgtttagtatggtgggctttgaatttttttcactatcaaaaatagtgcttttgtttagttaaaaattgtagtttttctttttttgtgtgtccaaactaacataaaaggagtggtcaaagaaggaaagaagaaaaatgagggaggatgtccgaaactgtatggcattttactccttctgaaagagaaatactgtacttgaatttttgagctatgcagacttatacctagattgttgtgtttctttgattcttaggagaaaagctttcttcctaataattcttgagaactttatattttgtttgaaaacagtttctatgtacataaaaagggtatttacccatttgtgagcacttaaaacactccacagagtcagacagtgggaaaggtcaccctttttttattcggcaggtatcaagttagaatgtatggaattgtgaataaaattatattttattttatgaaaatatttttatataataaaatttaaaaggctggtaagctaaaaaaatagtcttctttaatcctagtgtgttttccccaatttagtcttttctaaaatttatctgttttagagtagaaaatattatatcctgagaatcacagaatcatctaaatatgtcttattcaactgaagtgattgtaagtctttattcttgtgctttggttaaatgaatgataatttagttgatagtgaaagttaatgtgtttttatatttttagagtgagggaaaaatactaaacttttgagagttttgttgtcgttgctggttttttaccatgtggtactaaattccactttgatacaaaatttaaattttgtaacttctcaaaatcacttaagattcttcagttttacctgtgcttcttgacatcgctcctataatgtatgttagttaactctgcatatggcaaatcttgtcttgaattatatcannnnnnnnnnnnnnnnnnnnnnnnnnnnnnnnnnnnnnnnnnnnnnnnnnnnnnnnnnnagtgtggggggtattgttatgagtaaaactttatcaaaacttggcctgaaaaagagataactcatgatccattgctatctttattactcaaaggctgttcattcccataataccagatccataatagttgtagtttttttgatgttgttgcccttaccttaattatttgtagttttagtaggccttgcctcagtttttcccacagaattccataattttaatgttgaactaacccatctatataggacttctaaaaactacgtcaggaatgtaaggttaaatgagaggtagaacttgtagtgtaataggtataatggtagctttcaaagttttatcttctcaaaacattgtcttagccagtgtatttctgagaactcagactgaagcacagaagtcacagtatgcttcttttatttaagcacacagattcatgacacaagtacttgttgaacaagtgttctcattgcagagagatctacttgaatataaaagggtcatcatactagattattaaaaagaattggaaatcttgagttgtggaagaaatgtttatgctttggagatctaaaaaagttatgaatgtaggaattagataagtccagtttgttctgttaatataaaatggttagatatattaaactgcaagtagtatcagcttcaccataagcttgggccttcctccatcttgttttatttaagtctctttaaatgaaattttgttgtcattgtttcagcattcatgaactttcttactatcacaggttctactttaattttccttgccatatgtgtttccattttgtgggacattagccaccacaggaacacaagagttgtcagaagactcctgggtgtacagagcaaatcaagctgcatcagtattataggataccaaacagaatcctttctattaggaaataagaaatcagttaagtgnnnnnnnnnnnnnnnnnnnnnnnnnnnnnnnnnnnnnnnnnnnnnnnnnnnnnnnnnnnnnnnnnnnnnnnnnnnnnnnnnnnnnnnnnnnnnnnnnnnnnnnnnnnnnnnnnnnnnnnnnnnnnnnnnnnnnnnnnnnnnnnnnnnnnnnnnnnnnnnnnnnnnnnncagtccacctttctaggccttggttccttgcctgaaaaatgaaagaggcgctggctttccacagtgtcatgctttggcactttagctatggttttctttctgtgtgtgtgtaagccactgcttataataaaaccaacaataccctcagactgaaagggcggaagttattatctgcatctttatcaaccccaagccccacttcctccctgacctccccatgccctccccagcctctcccagcacaagtggggcaaagccagcatgcaagcagaccccaccaccacagcccacctccgtcctcacatacgtgcaggctggctcgggagtccagtgagcagagcattggacttggctggccagagggtctctgagggcaagagacatggccaaccaagggcaaggagtgaccctgtggagggt

SEQ ID NO: 760 - protein, 126 aa, Human
  unsure 66: unknown amino acid
  unsure 67: unknown amino acid
  unsure 68: unknown amino acid
  unsure 69: unknown amino acid
  unsure 70: unknown amino acid
  unsure 71: unknown amino acid
  unsure 72: unknown amino acid
  unsure 73: unknown amino acid
  unsure 74: unknown amino acid
  unsure 75: unknown amino acid
  unsure 76: unknown amino acid
  unsure 77: unknown amino acid
  unsure 78: unknown amino acid
  unsure 79: unknown amino acid
  unsure 80: unknown amino acid
  unsure 81: unknown amino acid
  unsure 82: unknown amino acid
  unsure 83: unknown amino acid
  unsure 84: unknown amino acid
  unsure 85: unknown amino acid
  unsure 86: unknown amino acid
  unsure 87: unknown amino acid
  unsure 88: unknown amino acid
  unsure 89: unknown amino acid
  unsure 90: unknown amino acid
  unsure 91: unknown amino acid
  unsure 92: unknown amino acid
  unsure 93: unknown amino acid
  unsure 94: unknown amino acid
  unsure 95: unknown amino acid
  unsure 96: unknown amino acid
  unsure 97: unknown amino acid
  unsure 98: unknown amino acid
  unsure 99: unknown amino acid
  unsure 100: unknown amino acid
  unsure 101: unknown amino acid
  unsure 102: unknown amino acid
  unsure 103: unknown amino acid
  unsure 104: unknown amino acid
  unsure 105: unknown amino acid
  unsure 106: unknown amino acid
  unsure 107: unknown amino acid
  unsure 108: unknown amino acid
  unsure 109: unknown amino acid
  unsure 110: unknown amino acid
  unsure 111: unknown amino acid
  unsure 112: unknown amino acid
  unsure 113: unknown amino acid
  unsure 114: unknown amino acid
  unsure 115: unknown amino acid
  unsure 116: unknown amino acid
  unsure 117: unknown amino acid
  unsure 118: unknown amino acid
  unsure 119: unknown amino acid
  unsure 120: unknown amino acid
  unsure 121: unknown amino acid
  unsure 122: unknown amino acid
MNFLTITGSTLIFLAICVSILWDISHHRNTRVVRRLLGVQSKSSCISIIGYQTESFLLGNKKSVKXXXXXXXXXXXXXXXXXXXXXXXXXXXXXXXXXXXXXXXXXXXXXXXXXXXXXXXXXSPPF

SEQ ID NO: 761 - DNA, 3828 bp, Human
  unsure 3065: unknown base
  unsure 3066: unknown base
  unsure 3067: unknown base
  unsure 3068: unknown base
  unsure 3069: unknown base
  unsure 3070: unknown base
  unsure 3071: unknown base
  unsure 3072: unknown base
  unsure 3073: unknown base
  unsure 3074: unknown base
  unsure 3075: unknown base
  unsure 3076: unknown base
  unsure 3077: unknown base
  unsure 3078: unknown base
  unsure 3079: unknown base
  unsure 3080: unknown base
  unsure 3081: unknown base
  unsure 3082: unknown base
  unsure 3083: unknown base
  unsure 3084: unknown base
  unsure 3085: unknown base
  unsure 3086: unknown base
  unsure 3087: unknown base
  unsure 3088: unknown base
  unsure 3089: unknown base
  unsure 3090: unknown base
  unsure 3091: unknown base
  unsure 3092: unknown base
  unsure 3093: unknown base
  unsure 3094: unknown base
  unsure 3095: unknown base
  unsure 3096: unknown base
  unsure 3097: unknown base
  unsure 3098: unknown base
  unsure 3099: unknown base
  unsure 3100: unknown base
  unsure 3101: unknown base
  unsure 3102: unknown base
  unsure 3103: unknown base
  unsure 3104: unknown base
  unsure 3105: unknown base
gtgaaattgaagtttgtgtatatgaaagttatcttagacatatttttaattctccagtttctgcaaaataattaaaatatacagtaactggtctcctaaatcctgaatttaatgtattaaatacttatgttctttatattggtgcctttttaaaatgcattgagagtgttggttagctgttgcagctgtacaacacttttaatatgcatttttaaaaatcacttaaaattgagtactatataattcatctctgcatttttagtgcaaatctttagagcaatttctaatagagaaattttcagctcagctgttaaaaggaaaaggaaactttgaaactagactttactacctttttagtttcatagtatttctgaatatgattacaagattatgcaggtaaaatatagagtgaaactttacctgtgaattgaattataatttgtgtttttgttttgtttttaaggaagaataagttctgtatcaaacaagaatttattagataattttttggtcaataaaatacagtattcatttggattttcatctccagactagtattgttctagtcttggaatctgtattttctaatctgttagaaaatagagattgaaaattgatggaataatgtgaaaaagcaggtaattaattctccttgaacaaagcaaaactgaacagtcatatcacattgctattctccaaagcataatctcaaatggtttcatatcatggttgtgtattacttgcaatgggtgtgttaggatatgacagctttttaaaaaaatgagctgctggttatacaaagcaaatggcatatgaccaagaagctgtgatatgctagtgtttctttttatcatagtgtattactaggccaaataatgacaccttgaatatttttacatttattgcagaaaccttaaacttggaatttccataaggtttttatgtaatattctatttctagctttttagttttatcttgctgtactgtaagtttgaggatatttttcacctgcactcttaggaataagttcataattctgtttatggggctttcctcccataacactgcatttgtatattttctgtataaaatatgtgttgtgtattaacctttatcccatacagagagtggtacatgaatgactagttttctaagatgtcctttttattgtgaataaaatataaaagttaaaggccctctgctaagtcacataaagtacagcatataagttcatataggtacaaataaatgagtttgcagtggattgggccttcaaattacctcaagtgacagatagtaagaaaagcttcttgagcaggtggaggtcactgaatcccctactatgcacttatcaagattttacttactttaatttactggaaattgattttttaaaaaatgactacactgtaacaagggaagggatctgggtttttttgttgttttattcttgttttttttaagtagttcaaattctgaaactgtgatttaaaaattttttacagtcaagcattctgattttgaacataactcccttccctttctgtgtaacaaaggtctctctgttatctcttaaattttgttacatctccctcagcctctttctttgtccgtctcccttctgtcattgtctatggatgtttacctctctgttctcctaaaagtttgaagattaggtcaactcttatttctagttcattggtaatttaatcctaatttttttttcgtgatttttgttggttgtataatctgctgacgtatttttatactcaagtgtagttttctattaaaaagaaaagtggttggattaaaaatagtaagctatgtaaccctcatgttactttcactttcaaatattgggtacctaaaacattacttcagagattatgtaatcctattatagtatgtttgctttcctttattgttggattttacattctgatttggctttcctccaaaaaatgtatatcatgaaagactagacagttatttgcaagtgtttagaaaggtgttaaaaatgtaaagcaaagagtcttaactttctcctaattgggagaaaaatgctttaacattactataataatattccaggtttggagggggtctccaggccccatatttgctgttaatagttggaccttttagaccatgtgttatttgcaatcccagaatgattgcttctgctattagttaaaaagatactattcttttctttctgtacaagtgcaatactccccttgaagtcttaaaaactatggtgatttttttttcttttctgacctattcttcctttagctaatgacaaaaagaaactcataaaagtcatagtatgttaaaggacacaacaagcaaagagaaaaacactccacaatcaaaagattacagaatgtggaaaccactagtctgatctcatggtatctttatttaagctaaatttccatggaaattagtaatcttttgcttgaaaaatgtgtcctaaagttgaactttttacagattgaatcttcttagaccctcgcccaatgctctaaattaagaacctaatacttaatatttttattttacttctccccttttagaaataaacttttaaataaaagcaaagcacttagctgagttttaaacacttacatatcacctattggagaaatttttttttaaaaatatttggagcagtcctgttttcatacaaatttaagtaagaggtatttttcttatacatatttatatgtagtgtgctaattttctttttttatacctgtgtccctgtagtaaaactgctgtaatataaatacatgttttgttaaaagataacatttctttggcatttcttttaaaggcagttactgcatttctgcatttgtacagtatgtgtcttggccattttagatattctttctttaacaataccaaaggtaattagactattttaaagactaattgcttgacagtttctagggtattttgtgttttagaagcaaaaaaagaaaaaaaaataggtcaaaccagtaaacctcattttttttcaaactaataatttggggaaataaaaactattgtttannnnnnnnnnnnnnnnnnnnnnnnnnnnnnnnnnnnnnnnnaagttaaaattccataccttgtatgtcaggtttgctaagtgtaatgtagttttttttaaggctcaaataccatacctcagaaaatgaggtttactatggaaatactgaaacagtctttgcagctgtgtgacaagtcactctactacatactgatttggagacctccgctaaatagttttatcactgcagactaaaatgtgggacttgtatcttctttgtttttaatgcacacacatacatgttctgtgcatgtatgtggttactgtgtatatgtgtatgagtgttgtatatgcatgtgtgagtgtgtgtctgtatgtgtgtacaactaaagaagctgcagaaactttgtaatactttgtgaaaaggattatattataaaggtttgtactgtctgagtgcacagctactggaataaatttagggaatctcaggaacaagcatataatttgtccaagatttatttcttctcagaagtgtaagtgcagtttttaattctgtatattatttaatattttaccaataaaataaacttctgacatacagaagtcctaggtctttactcttaagtttgaccttctacagagtcctagagcatggagacaatgcagccagttctttgtttatactaacaaggtttggtccagttcctaataaattcttaatttgtatctgagatgtcagcttggcctttactgtctatatttgtatgaacattttgatcac

SEQ ID NO: 762 - protein, 24 aa, Human
VKLKFVYMKVILDIFLILQFLQNN

SEQ ID NO: 763 - DNA, 484 bp, Human
  unsure 56: unknown base
gttagtgcctagatgggagccgttcatgcctgcaaaaaaatgcaatggcctcgttngacgggtgtgcatcctaagagtaacctgctcccacagggtttgtggtggggagacgactggttaactttttggaaaggccaagctggcgtctttctaaatggcatgtgtggtggagtgttccaccacctagaaagactggagtaacgatggagtcactccagaaggtgagagctctgcaactgagggcctgcgagctctgttacgaaggaaatcgaaagctgcaatgggcctcgttaggatgctgttagggtttaggagggtcctggcctcattgcacaccctatcctgggtgtcccagtcagagacacacccacaatcacgctccctggcatcatgagggtagagggaggagctctctggatcaactggagcaggaaggggcactgtggacaggtgtggctggtgttggcctgattctggcacattc

SEQ ID NO: 764 - DNA, 358 bp, Human
  unsure 28: unknown base
  unsure 36: unknown base
  unsure 40: unknown base
  unsure 104: unknown base
  unsure 138: unknown base
  unsure 139: unknown base
  unsure 189: unknown base
  unsure 318: unknown base
  unsure 319: unknown base
gtaacatgtgaagtccagatccaagggnacctcagnaatncattgaagttccattgttaagaagttctgtttgtttggcaactgctttaaacccgatagaacangatcagaagtggcagtctataactgaaaatgtgnnaaagtacttgaagcaaacatcccgcatcgctattggacctctgagacttnctactttaacagtttcacagtctttgccagttctaagtaccttgcagctgtattgctcgtctgctttggagaccacagtttctaacagactttcaacagaggactgtcttattccactcttcggcgaanntttacgttcatgtaaacagcatgacgtgaggccgtggat

SEQ ID NO: 765 - DNA, 252 bp, Human
  unsure 124: unknown base
  unsure 136: unknown base
  unsure 163: unknown base
  unsure 204: unknown base
  unsure 205: unknown base
  unsure 206: unknown base
gattcctaccagggcaaaggctttgtcatgtcccgggccatgtatgtgtgagctgccatgcgcctggcgtctcacatctcacctgttgatcccttagctttcttgccaaggatctagtgccccntgacctctggcnaggccactgtcagttaacacatatgcnttccatttgtgatgtctaccttggtggctccactatgaccnnnaacccatgagcccagagaaattcaccgtgataatggaatcctggca

SEQ ID NO: 766 - DNA, 1360 bp, Human
  unsure 502: unknown base
  unsure 503: unknown base
  unsure 504: unknown base
  unsure 505: unknown base
  unsure 506: unknown base
  unsure 507: unknown base
  unsure 508: unknown base
  unsure 509: unknown base
  unsure 510: unknown base
  unsure 511: unknown base
  unsure 512: unknown base
  unsure 513: unknown base
  unsure 514: unknown base
  unsure 515: unknown base
  unsure 516: unknown base
  unsure 517: unknown base
  unsure 518: unknown base
  unsure 519: unknown base
  unsure 520: unknown base
  unsure 521: unknown base
  unsure 522: unknown base
  unsure 523: unknown base
  unsure 524: unknown base
  unsure 525: unknown base
  unsure 526: unknown base
  unsure 527: unknown base
  unsure 528: unknown base
  unsure 529: unknown base
  unsure 530: unknown base
  unsure 531: unknown base
  unsure 532: unknown base
  unsure 533: unknown base
  unsure 534: unknown base
  unsure 535: unknown base
  unsure 536: unknown base
  unsure 537: unknown base
  unsure 538: unknown base
  unsure 539: unknown base
  unsure 540: unknown base
  unsure 541: unknown base
  unsure 542: unknown base
  unsure 543: unknown base
  unsure 544: unknown base
  unsure 545: unknown base
  unsure 546: unknown base
  unsure 547: unknown base
  unsure 548: unknown base
  unsure 549: unknown base
  unsure 550: unknown base
  unsure 551: unknown base
  unsure 552: unknown base
  unsure 553: unknown base
  unsure 554: unknown base
  unsure 555: unknown base
  unsure 556: unknown base
  unsure 557: unknown base
  unsure 558: unknown base
  unsure 559: unknown base
  unsure 560: unknown base
  unsure 561: unknown base
  unsure 562: unknown base
  unsure 563: unknown base
  unsure 564: unknown base
  unsure 565: unknown base
  unsure 566: unknown base
  unsure 567: unknown base
  unsure 568: unknown base
  unsure 569: unknown base
  unsure 570: unknown base
  unsure 571: unknown base
  unsure 572: unknown base
  unsure 573: unknown base
  unsure 574: unknown base
  unsure 575: unknown base
  unsure 576: unknown base
  unsure 577: unknown base
  unsure 578: unknown base
  unsure 579: unknown base
  unsure 580: unknown base
  unsure 581: unknown base
  unsure 582: unknown base
  unsure 583: unknown base
  unsure 584: unknown base
  unsure 585: unknown base
  unsure 586: unknown base
  unsure 587: unknown base
  unsure 588: unknown base
  unsure 589: unknown base
  unsure 590: unknown base
  unsure 591: unknown base
  unsure 592: unknown base
  unsure 593: unknown base
  unsure 594: unknown base
  unsure 595: unknown base
  unsure 596: unknown base
  unsure 597: unknown base
  unsure 598: unknown base
  unsure 599: unknown base
  unsure 600: unknown base
  unsure 601: unknown base
  unsure 602: unknown base
  unsure 603: unknown base
  unsure 604: unknown base
  unsure 605: unknown base
  unsure 606: unknown base
  unsure 607: unknown base
  unsure 608: unknown base
  unsure 609: unknown base
  unsure 610: unknown base
  unsure 611: unknown base
  unsure 612: unknown base
  unsure 613: unknown base
  unsure 614: unknown base
  unsure 615: unknown base
  unsure 616: unknown base
  unsure 617: unknown base
  unsure 618: unknown base
  unsure 619: unknown base
  unsure 620: unknown base
  unsure 621: unknown base
  unsure 622: unknown base
  unsure 623: unknown base
  unsure 624: unknown base
  unsure 625: unknown base
  unsure 626: unknown base
  unsure 627: unknown base
  unsure 628: unknown base
  unsure 629: unknown base
  unsure 630: unknown base
  unsure 631: unknown base
  unsure 632: unknown base
  unsure 633: unknown base
  unsure 634: unknown base
  unsure 635: unknown base
  unsure 636: unknown base
  unsure 637: unknown base
  unsure 638: unknown base
  unsure 639: unknown base
  unsure 640: unknown base
  unsure 641: unknown base
  unsure 642: unknown base
  unsure 643: unknown base
  unsure 644: unknown base
  unsure 645: unknown base
  unsure 646: unknown base
  unsure 647: unknown base
  unsure 648: unknown base
  unsure 649: unknown base
  unsure 650: unknown base
  unsure 651: unknown base
  unsure 652: unknown base
  unsure 653: unknown base
  unsure 654: unknown base
  unsure 655: unknown base
  unsure 656: unknown base
  unsure 657: unknown base
  unsure 658: unknown base
  unsure 659: unknown base
  unsure 660: unknown base
  unsure 661: unknown base
  unsure 662: unknown base
  unsure 663: unknown base
  unsure 664: unknown base
  unsure 665: unknown base
  unsure 666: unknown base
  unsure 667: unknown base
  unsure 668: unknown base
  unsure 669: unknown base
  unsure 670: unknown base
  unsure 671: unknown base
  unsure 672: unknown base
  unsure 673: unknown base
  unsure 674: unknown base
  unsure 675: unknown base
  unsure 676: unknown base
  unsure 677: unknown base
  unsure 678: unknown base
  unsure 679: unknown base
  unsure 680: unknown base
  unsure 681: unknown base
  unsure 682: unknown base
  unsure 683: unknown base
  unsure 684: unknown base
  unsure 685: unknown base
  unsure 686: unknown base
  unsure 687: unknown base
  unsure 688: unknown base
  unsure 689: unknown base
  unsure 690: unknown base
  unsure 691: unknown base
  unsure 692: unknown base
  unsure 693: unknown base
  unsure 694: unknown base
  unsure 695: unknown base
  unsure 696: unknown base
  unsure 697: unknown base
  unsure 698: unknown base
  unsure 699: unknown base
  unsure 700: unknown base
  unsure 701: unknown base
  unsure 702: unknown base
  unsure 703: unknown base
  unsure 704: unknown base
  unsure 705: unknown base
  unsure 706: unknown base
  unsure 707: unknown base
  unsure 708: unknown base
  unsure 709: unknown base
  unsure 710: unknown base
  unsure 711: unknown base
  unsure 712: unknown base
  unsure 713: unknown base
tcgagccaccatgctaggccagtctatcttccttagttctccattttcttctataagacagaactaatcatgttacttagagaattaaattcaaacatggctcttcacagtttggccataacctatctctttaattttttctttccttgaattttttgagatattccagacccttggatggctttttgtttgcccccgtccctaagccgccttgatcatttttaatagcttaaaaagtacttttaagtattttatttcatcatgcctttaactgtcttttactatgtgctgtcatgttgtatgctaggatacgtagatgagtaaggcatgatctctgcctttgatccttactattaggaaataaggtgtattttatagttatgttagtattgagaaaatgaattctaagaatatgagttatagctaatttaaaaagtaccgtattcccagacatcagtccagagctatataatccgtgtccatgcctcttttaaaaaaaacnnnnnnnnnnnnnnnnnnnnnnnnnnnnnnnnnnnnnnnnnnnnnnnnnnnnnnnnnnnnnnnnnnnnnnnnnnnnnnnnnnnnnnnnnnnnnnnnnnnnnnnnnnnnnnnnnnnnnnnnnnnnnnnnnnnnnnnnnnnnnnnnnnnnnnnnnnnnnnnnnnnnnnnnnnnnnnnnnnnnnnnnnnnnnnnnnnnnnnnnnnnnnnnnnnnntcaaacgatcttcccaccttagctgttttgggtttgagtaacatgtaattgttacttgcctttaagtgcctctctttcagctcatgtggacaagaaaataatccctatcctgttgtttaaaagtgggtatacacacatttttgtgatttttagacttttttgcctgattttcacacagttttgactttaattttcttctttattagaagatatgggtaactttagaacctctgagttcaaggaaggatctaagcaatgaggccagaggagtgagatgtcctatggtaaccaagcataccatttctttgtcaagtgggcttttgtttatggctgcttaggggcttaaaagctccatggactggtgaggattatcatttgaatggaatttccccaattcaagaaccttactattatcctccaatcagttctacactgttggggaaaatcccctggaccttatataacatactttgtaaccatgcagttagttactcttacactcttgtcattataaatgcttgatcaatagttgatagactagctcttgatcagagtacccttgtatggagagaaggaaaaaatgccatacatttcacttgattctgtgaaccataatgcttaggacagtagtggtttgggtttgattt

SEQ ID NO: 767 - protein, 90 aa, Human
  unsure 8: unknown amino acid
  unsure 9: unknown amino acid
  unsure 10: unknown amino acid
  unsure 11: unknown amino acid
  unsure 12: unknown amino acid
  unsure 13: unknown amino acid
  unsure 14: unknown amino acid
  unsure 15: unknown amino acid
  unsure 16: unknown amino acid
  unsure 17: unknown amino acid
  unsure 18: unknown amino acid
  unsure 19: unknown amino acid
  unsure 20: unknown amino acid
  unsure 21: unknown amino acid
  unsure 22: unknown amino acid
  unsure 23: unknown amino acid
  unsure 24: unknown amino acid
  unsure 25: unknown amino acid
  unsure 26: unknown amino acid
  unsure 27: unknown amino acid
  unsure 28: unknown amino acid
  unsure 29: unknown amino acid
  unsure 30: unknown amino acid
  unsure 31: unknown amino acid
  unsure 32: unknown amino acid
  unsure 33: unknown amino acid
  unsure 34: unknown amino acid
  unsure 35: unknown amino acid
  unsure 36: unknown amino acid
  unsure 37: unknown amino acid
  unsure 38: unknown amino acid
  unsure 39: unknown amino acid
  unsure 40: unknown amino acid
  unsure 41: unknown amino acid
  unsure 42: unknown amino acid
  unsure 43: unknown amino acid
  unsure 44: unknown amino acid
  unsure 45: unknown amino acid
  unsure 46: unknown amino acid
  unsure 47: unknown amino acid
  unsure 48: unknown amino acid
  unsure 49: unknown amino acid
  unsure 50: unknown amino acid
  unsure 51: unknown amino acid
  unsure 52: unknown amino acid
  unsure 53: unknown amino acid
  unsure 54: unknown amino acid
  unsure 55: unknown amino acid
  unsure 56: unknown amino acid
  unsure 57: unknown amino acid
  unsure 58: unknown amino acid
  unsure 59: unknown amino acid
  unsure 60: unknown amino acid
  unsure 61: unknown amino acid
  unsure 62: unknown amino acid
  unsure 63: unknown amino acid
  unsure 64: unknown amino acid
  unsure 65: unknown amino acid
  unsure 66: unknown amino acid
  unsure 67: unknown amino acid
  unsure 68: unknown amino acid
  unsure 69: unknown amino acid
  unsure 70: unknown amino acid
  unsure 71: unknown amino acid
  unsure 72: unknown amino acid
  unsure 73: unknown amino acid
  unsure 74: unknown amino acid
  unsure 75: unknown amino acid
  unsure 76: unknown amino acid
  unsure 77: unknown amino acid
  unsure 78: unknown amino acid
MPLLKKTXXXXXXXXXXXXXXXXXXXXXXXXXXXXXXXXXXXXXXXXXXXXXXXXXXXXXXXXXXXXXXXXXXXXXXXKRSSHLSCFGFE

SEQ ID NO: 768 - DNA, 3562 bp, Human
atcgagcttcagattgtttactatttaagatgtacttttacaaaggaacaaagaagggaaaaggtatttttgtttttgttgtttggtctgttatcatcaataacctgttcatatgccaattcagagaggtggactccaggttcaggagggagaagagcaaagccgcttcctctctgtgctttgaaacttcacaccctcacggtggcagctgtgtatggaccagtgccctccgcagacagctcacaaaaccagttgaggtgcactaaagggacatgaggtagaatggatgcttccatcacagtaccatcattcagaataactcttccaatttctgctttcagacatgctgcaggtcctcatctgaactgttgggttcgtttttttttttttttttcctgctccaagaaagtgacttcaaaaataactgatcaggatagattattttattttactttttaacactccttctccccttttcccactgaaccaaaaagaaatcccatccctaaaacctgccttctccttttatgcaaaactgaaaatggcaatacattattatagccataatggtatagatagtgattgcgtttggctatgtgttgttttctttttttttaaattatgaatatgtgtaaaatctgaggtaacttgctaacgtgaatggtcatataactttaaagatatatttataattatttaatgacatttggacccttgaaacatttcttagtgtattgatatgttgacttcggtctctaaaagtgctctttattaaataacaaatttcttcagtggtctagagccatatctgaaatattgctaagcaatttcagttcatccaggcacaatgtgattttaaaaaatacttccatctccaaatattttagatatagattgtttttgtgatgtatgaaggaaatgttatgtttagttctttcagatctttgaatgcctctaacacagctttgccttctaaagcggtaattagggatttaaaaaacaacctttagccctttatcagcatgaaatgctggagtgatgtggttttctaatttctttggggtaattatgactcttgtcatattaaaaagacaagcacaagtaaatcattgaactacagaaaaatgttctgtggtttcatagttaagcaaaactctaaatcgccaggcttcatagcaaagacatagtcagctaaaagccgcacatgtggatagagggttcaattatgagacacctagtacaggagagcaaaattgcaccagagattcttaaccaaccagccttaccaaacaacacaacaggggaaccccaatctgccttacccaaggccccactggcagctttccacagaatttgcatttagaggagcagaatgacatcactgtcctttgggagtaggtcctctgaaaaggcagcaggttccagcaggtagctgagctgagaggacatatggcccacggggacctacagacagcctttgacatttgtatttcttacaatggagggccaaggagggcaaggggctgtggagtttggtgtctactagtgtgtatgaatttgagctagagtccttctgtggcatgcactttgaccactcctggcagtcacatggcagatttccaagtgcaaatccttaatccaaacaaggatcatctaatgacaccaccaggccaatccctgctctcctccccgaaaagtcagggtcccttcattggaatcctccacccacccaagcagaatttagcagagatttgccttcaaaccctaacggcccccttgttctctggtccttctcaaacccacctttgtaggccacccagcattgcaggacagcgtgtggggcagctggacctgtgcttcctgcctgggagtctcccttggaattcatcctgactccttctaataaaaatggatgggaaagcaaaacactttgccttctaaaggccgtataccaagtatgcttagataaataagccacttttctattacttaagtaagaaggaagtagtaattgatactatttattgtttgtgtgtggtagcttgaagcacaccactgtccatttatttgtaagtgtaaaatatgtgtgtttgtttcagcagcacttaaaaaagccagtgtctggttacacatttcaattttaattaattgacataaaaatgctaccgccagtgccagctgcatcctatttaattaaaaaggtactatatttgtacattattttttaatgttaaaagggcttttttaagtttacagtacacataccgagtgactttagggatgcttttgtgttgaaatgttactatagtggctgcaggcagcaacccagaaacactttagaagctttttttccttgggaaaaattcaagcacttcttccctccaccctcactccaaccaccccaatgggggtaattcacatttcttagaacaaattctgcccttttttggtctagggattaaaattttgtttttctttctttctttttttttttttttcactgaacccttaatttgcactgggtcatgtgtttgatttgtgatttcaagaccaaagcaaagtcttactactactgtggaaccatgtactagttcctgggaattaaaatagcgtggttctctttgtagcacaaacattgctggaatttgcagtcttttcaatgcagccacatttttatccatttcagttgtctcacaaattttaacccatatcagagttccagaacaggtaccacagctttggttttagattagtggaataacattcagcccagaactgagaaactcaacagattaactatcgtttgctctttagacggtctcactgcctctcacttgccagagccctttcaaaatgagcagagaagtccacaccattagggaccatctgtgataaattcagaagggaggagatgtgtgtacagctttaaggattccctcaattccgaggaaagggactggcccagaatccaggttaatacatggaaacacgaagcattagcaaaagtaataattatacctatggtatttgaaagaacaataataaaagacacttcttccaaaccttgaatttgttgtttttagaaaacgaatgcatttaaaaatattttctatgtgagaattttttagatgtgtgtttacttcatgtttacaaataactgtttgctttttaatgcagtactttgaaatatatcagccaaaaccataacttacaataatttcttaggtattctgaataaaattccatttcttttggatatgctttaccattcttaggtttctgtggaacaaaaatatttgtagcattttgtgtaaatacaagctttcatttttattttttccaattgctattgcccaagaattgctttccatgcacatattgtaaaaattccgctttgtgccacaggtcatgattgtggatgagtttactcttaacttcaaagggactatttgtattgtatgttgcaactgtaaattgaattatttggcatttttctcatgattgtaatattaatttgaagtttgaatttaattttcaataaaatggcttttttggttttgtt

SEQ ID NO: 769 - protein, 94 aa, Human
MADFQVQILNPNKDHLMTPPGQSLLSSPKSQGPFIGILHPPKQNLAEICLQTLTAPLFSGPSQTHLCRPPSIAGQRVGQLDLCFLPGSLPWNSS

SEQ ID NO: 770 - DNA, 493 bp, Human
  unsure 55: unknown base
  unsure 57: unknown base
  unsure 59: unknown base
  unsure 64: unknown base
  unsure 68: unknown base
  unsure 70: unknown base
  unsure 81: unknown base
atttaagatctagtagccacgctaaaaaacaagtaaaattaattttaatatattnancncaatncatngnagatattattncagtaagatatttttcattcttatgaaactaagtctgtctggtttgcatatctcagttgagacactaaagttttactgataatacttaatccatgtttagatttcataaaatctaaatttgcaaagtaaatttacatacccatgttggtctaaatgtgcttaaaagttttccaataactgaaatgagtatcagttttaaatttaaaaatttgttacttggttactccatatttcaggtattagtggctaccatattggtcagagcagattcataggatgatttcccaggtttgaagtgtgtgtatatttctggtattataagatgtcagactggtttttggagaaatatgttgtcttaatttttacctgctttgatatgacctttctgtgtgtacgtgtgacatttctttat

SEQ ID NO: 771 - DNA, 3044 bp, Human
ggttctgttaaggtacaactactgggccttgaaatctatccttcacaatcttggctgagataaggacttggcacaggatgatagagcctggacacaagagatctggagagggaactgatatttgctgctacattcagattatgagatgtcagggaactgtaaaaagggtaatgaatttttaaagagagtaaagagttatgctgtgtcccggtcaactgaaatacattaaaaattaattagatggtagttcttaactttttaaggcagataccttgagaatctagtgagttatagaccctctccctagaaaagtatagaactgtttatatggacaataattcacatgcattcagagatcttagggatctcctgaatgttttcttggatcccaagtgaaaaattcctgaatcaggtctcttaggtgtgcggttaatgtcatgtataacaatggggggacccttacttatctaaatataattatcccaatcctaataatgatgaggttgcataggaaagtaatagtgtaccaaactttagattattcactaaaaaagttgttcatttatgaagtagtcgtttatcaaacatgtcctccccactcagcaaactatgccttctatttattatatatgggtcagtttcactataattactgagtgttataaacatctgaccataacattttgaaatgatgcaaataaatttccaaacaaaaatagtgtgaatttaaaagcaaattatttgagtatctaagaaacaagatagacttctagaaaaatttgactctctagaatatttcttgcagaaatgagatttttcataatagtaaaagaggcatatgtttatcaaacaatgctgtcacaaaaagcatcaactgtaatgggactattaatgcataattattgatttattcattcaattaatatacaattatcccttttcatttaaagatttaattcataattacaattataataaaacttcctttaaagtaagatacaataattttattgtttttcattcttttttcaacaaaatatcccatccaatcattttttatattattaaatattggctgctttttcttggattcacattaaacagccctttccaacttccaattgtcttaaaataatgatgacctcctgtgagtagatacagctctttacaatttttttctttagtgccttttcttcttgaatttttcctatatcaaatggagaatatatgtacagatggtattttctcagtttataggcatatcagtgaccatggctttctttatataggtttttaaaaaagccctaaataataaatagccagatgagctggggacattgagaaatagccttcctcttcctttttcaactcatttttttcccacctacatgactgtaaatcaaatatttaatagctcttacttaaaaaaacagatacaaagaatgtcttgatttggtgtgctcatttaccataatgtcatgaggggaattagatttcacaactttaaaaggaatatatttttattttattttgaaaaactgagtcatataggaattttcttatacttcaaggcatcatggaaacacttttttcctgtttggatattgtggaatttaaacgttcaaataaataaatggcataactaagtgttccaaatttttttacaatgtctttgaccctattcaaacactttaggtatttactgaccgtctgatgtgtaagatgtggaataaaactggaatcaattaattatttcactgtgttatcagcgcaagatcaaccatctgggtttcttaaagacacccgaaggattgaattttgtttcagtattgataatggcatagtctctatgtgctacatggaattacatcatttatccctccagtgccctatatgttgataagtatgtcagtttgacttagtatacatatatacagagatttcattacatttacctaataaatacaaaatacatttcgagtgttactgatctcctatgttacatgagcctcctgtaatcattgtgcattgatgttccaatgttttattgtttgtatgaattttaatttgaaaacaaggaaacaatccaaaagcagaaaaaatagcttttcttaaaattttcagtgctacattttccctctgaggtccatagagatttgaatgtataggagattatccgaaaacagctattttgattaaaaaatatatctcccaggattcaaccaacttaatgatgaagtactattgtctactgctttatacataaaagggaactttttatctgcttgtaaagggatttttatgtgtatttctgcataatcagatgacttctattgtgttttctactgatgaaattctctgtaaaatgtctttttcttacattatccaacaggcataaagaataacagtaaagacttttgtgtttgtaatactacctcttttatccctgcactactgttttattgcaaaaattctatattgtcactgtattttttccatagaatataaattttgttcttgtgctaaagctggtagtttatgtagcagacaaaatatacaaataaaagaagagactgattttgctgaaagaattatatataatcaagaagttacatattgttctttaaatatgatactgaattttaaaagcaaacgaaattcaagaatcttatctaacagcatagcagttgcttatggcatacaaggctaaaattaattcagctatttaatcttaataattattatgtagttaaaaatctttgactttaatagtgttttacatatacaaatagctgaagtaacattcctataattttaatctgacattggttagatcaagaaaacattgttaataagactgtagaatttgtaattattgctatttttcatttttaataacaaagtaatgtgtcttattttctaagaaaatggagaactttggtgtactttaatacatacaaaaatctttgtaaaaataccttaaaatgtaccaatattttctttgcatatattaaatgaaagactataattatgaaatgttaaaa

SEQ ID NO: 772 - DNA, 1581 bp, Human
gttggtagaacaccttttcaccttatgtcaaaagcatgaaatatgaaggcctagaaacaaaggttaatttatatacatagtactaataattataccaagtctactattatttcctactagtcagatgatttttatgaatgtaaaatattagaaaggcacagtaagtgacaccaagattaataagacaaataggtatggcagaaacagagaggtatatgagctgcatagggatctctgttgataagaatctgtgtagacttttttctccttccttcctttgatctttgatcatgggaagacatggaaaaagaaagctaactacagtgattttgtccactacactgttatttggttaaaaattttagtttcctaatgagtattagcatgtatgagaaattatgggagaaaaaggcgcatcctagaaaaggtgtgcttaattactattggggattggttaacatagcatgggagctggattgtcagagattcattatctagaaaatggcaacaagagtttataaaacgaacttctgtgagattactttttagctagcaaagacaaagatgtccttcagtaggtgaagtgataaactatgatacatccagatgatggaatactattgaggactaaaaagaaataagctgtcaagccatgaaaacacatggagggacgttaaatgcatattactaagtgaaaaaagctaatctgaaagggctacatactgtgtgattctaactatataacattccataaaaggcaaaactgtgaagacagcaaaaaaaaatcagcggttgccagggtttagaaggaagggagggataaatgtgcagagcacagaggatttttaggccagtgaaaatacttcgtatgatactacaatggtggaaacatgtcattatacatttatccaaacccaaagaatgtccaccaccaagagtgaaccctcaactatggactttgggtgatgatgtgtgggacaggaggtatatgaaaaatctctgtaccttcctcccaattttgctgtgaacttaaaactgctctaaaaaaagtcttttttaaaaaaagctctatgaactagttggtattataaaccttaggccatttcaagtaaaaattacatatcaatgtttattaaatactgagttaatagctgaatacctctttcatatacaaataagtacatttgcaattttttaaaaaagtcttaattccattagtaactgtggtttcatagttgccaaataactgtaagctatggatgttgcacaagactgtgattttatttaatcatttcatatctatttaaacatttccaaagcgcacattcatcttaatgttttcacactatttttgctcaacaaaaagttattttatgttaatggatataagaagtattaataatatttcagtcaaggcaagagaacccgataaagatcattgctagagacgtttaatgttacctgtagcggtacacttgttaaagaagtgattaagcagttacataaaattctgatcatagctttgattgataccatgaaggtataattcagtgcctggatactaacaactttacttgttta

SEQ ID NO: 773 - protein, 52 aa, Human
MILQWWKHVIIHLSKPKECPPPRVNPQLWTLGDDVWDRRYMKNLCTFLPILL

SEQ ID NO: 774 - DNA, 463 bp, Human
  unsure 212: unknown base
  unsure 213: unknown base
  unsure 214: unknown base
  unsure 215: unknown base
  unsure 216: unknown base
  unsure 217: unknown base
  unsure 218: unknown base
  unsure 219: unknown base
  unsure 220: unknown base
  unsure 222: unknown base
  unsure 224: unknown base
  unsure 225: unknown base
  unsure 226: unknown base
  unsure 227: unknown base
  unsure 228: unknown base
  unsure 229: unknown base
atgcttttctttgtcttaagcctttgatgacagtgatgtgtttttatgaacgtagataaccacaagcagatgtgtcaaagctcttttgtccaggaataaactgagtttcgtcatcatcttgacagtactttcctggatgagtgttcaggaaacatgaaaagtttttaaacaattcaacaaatgtgtaataaaagtttgttatcttgttttannnnnnnnnanannnnnncttggcttgagtttttatttgggaagctaatagagagacgggatattagaaaaccagaggcaaactgcttggtttattgaagcactaactgaatgaatgcaggtatacgagtaatccaggaatcccatgcattaaggaaaaatttatttctatcacctctgtattgttgttaccttgtgaacctggcttggttttttcagcagttggtaaactgataagcctgtttctcactct

SEQ ID NO: 775 - DNA, 1704 bp, Human
gcctcaacctgacactcagcagcaagttaggcctatctacaaatctcctgctctgtgcccgcgcagtccagtggaggagatattcctaattagggggcacttccaaggggcggagtctccgcggcgagtggccgtggaggggcgcaaggcagacggtctccagccacgatacctgggccaatcccagcctgtcacgtcatgcctagtgagctgaacaagctgcgtaactgtcgtgtgcctcagtttccccacgtgtataatggaaatgattacaataaacaggacctttttgaggagttgccatgaggactgtcagacgccaaggcgccccgagaggcacttcgcttccatgccgaggccaagggcgcacaggtgcgtctggacacgcgtggctgcatcgcgcacaggcgcaccacgttccacgacggcatcgtgttcagccagcggccggtgcgcctgggcgagcgtgtggcgctgcgagtgctgcgggaggagagcggctggtgcggcggcctccgcgtgggcttcacgcgcctggaccccgcgtgcgtgtccgtgcccagcctgccgcccttcctgtgccccgacctggaggagcagagcccgacgtgggcggccgtgctgcctgagggctgcgcgctcactggggacttggtccgcttctgggtggaccgccgcggctgcctcttcgccaaggtcaacgccggctgccggctcctgctgcgtgagggcgtgcccgtcggcgccccgctctgggccgtgatggacgtgtatgggaccactaaggccatcgagctgctggatcccacagccagccggctcccaacacccatgccatgggacctcagcaacaaggctgtgcctgagcccaaagccacaccaggagaggagtgtgccatctgcttctatcacgctgccaacacccgccttgtgccctgcggccacacatacttctgcagatactgtgcctggcgggtcttcagcgatacggccaagtgccctgtgtgccgctggcagatagaggcggtagcccctgcgcagggccctcctgctctgagggttgaggaaggctcatgaaaggaggcttcccagtatgagtggcagcccgggcctagatctgagtctggcccctgcagagaggaaggaggcgcagccctaccttctttctggggaagagtcagaaaggctgattagcaagaggtgcggcagagagaggaaggcagggaggtgctgtctgctgcctccacctgttccccaacaggatagcaaggaaaaacccctctttctgtccatgccagaactatccttctgatggggtgctttgtttagagatggggtggcccaatccccaatcagttttacatctgagggagttcaggtatctgttgtgactggtgaagccctgtacctcctgggtattgaagaacctggacttgaagcaggaggtatctgcaaggaatgtataaagttccacatggaagctgggttgcctcccacaagtccccagtagagtggatctgtagttacccgccctgcctccctttcagggtggtcatgaggtcccagagagaccatgcatctgaagatgatttaaaacatgaaagtgtattgttgtcactgtggtaatttccttgccagtttctgagatatcaaaataaagtttgtgtttcctgaaaaaaaaaaaaaaaaaaaaaaaaaaaaaaa

SEQ ID NO: 776 - protein, 137 aa, Human
MPRPRAHRCVWTRVAASRTGAPRSTTASCSASGRCAWASVWRCECCGRRAAGAAASAWASRAWTPRACPCPACRPSCAPTWRSRARRGRPCCLRAARSLGTWSASGWTAAAASSPRSTPAAGSCCVRACPSAPRSGP

SEQ ID NO: 777 - DNA, 1809 bp, Human
ctcaaagtaaatccagtgcatctgtatatatgtgtagatagcagcaacaaacaatcctgaaacattatttttggctgttaggtaagtaaacgtgatgataattataaacaacattcaaataaccttggaccttggtgaaatgacttgtggtggccagaatggtgcaacaagatgttatttgcaagtttttttaagacacaaatatctcagatactaataatgagaataaagactgttgaatatgaaattaaagccaagcaataatgtgccaaaaagaggcagttataccagcaaatgcatctattatgggcacaccattatataatgatggtttgctttatgaagactgactgtaacccacaggataaaataagcaaaggcatagtttctgctttcttcctggaaaaacttgtttagaagcttcataaagaggtacagcactaatgagcattagtcaggatacagttggcatctatgtttttatgtgagcccagagggaagaggagccactcaaagtcttgctggcttaaaactcaagacagctgcaaccagaagttttgttgaaatggagactttaaacttatggtaattactctttctggacactagcatgtagaaagcaattcagttaactctgcccagaggattaccagctttagctgtgaaaaaatgggctcccggatgtaaaatcactaaaacatgagatcttgtatccaaagaggcttcaaatgatgccttacagaaaacgatgctccagatgggcacttctaaatgctaactcttcatcaagtatctttctggattcaagctcaaaattaattggctgcaaaatagtaggaataaaaatcacatattttacactttagaaaaggatattgatgatcaacctgcatggtgataattatgatgagataccccagtgatttaatgatgttagaaagaattaaatgggagagaattgctaacagctttcttgatctcttaactatggagatgtcattcatttatttctggggtgaaaattatagcttgctttttgacattgctgctagtattgttctttgttgctttaaaaattgtctctctttagaaaaactcttgagcagttaaacagttttttttctgattcatatcattgcttttaataacatgtaaaggctgtgtgtagagcaaactatataaaatgagtagaaagggcttactcatgttaattggcatccttgatgattttagttgagattccttaacatttattttagatcacatctttacgtaacttatttttcctaatgttttccatcgtgtcttaaaatgatgctggtatatcaggagattgcagtattatagtcatactccccaatccctagaggagaggaaagactaattcttgttttaagggcccctggagataccttttattaaggttgaaaaaggtcaacacagcctgaaaataagaaaaatatatactagcaattactaattttctaaatgtgtgtatctctgctgtactaatgtgtgaacaatatgtcgtgcataatactgtagctggtcgtggtatgtcaatacattctgtgagtgtgtacagtctgagtgatcagttttctatttttatgtgtaaaaaaaataacttgtcgtatcccatttaaaggccaatttctgtattcaggcaggcatatgtacatacatgaataaagccaacaaaagtgtgcacatgtattcagtaacagaatttgtccttttatttttgaaggtcagaaagggctgtttgatttgtgtttttgttttatcatctccttgagtaggtaacat

SEQ ID NO: 778 - protein, 67 aa, Human
MRYPSDLMMLERIKWERIANSFLDLLTMEMSFIYFWGENYSLLFDIAASIVLCCFKNCLSLEKLLSS

SEQ ID NO: 779 - DNA, 435 bp, Human
  unsure 55: unknown base
  unsure 56: unknown base
  unsure 57: unknown base
  unsure 268: unknown base
  unsure 269: unknown base
  unsure 270: unknown base
  unsure 271: unknown base
aggggtctgtcaaggcaacacacaaaatctccagttaccttctggtggatgacgnnnggagacacatcgcgtccgtcacaggacacacttccgatggatttacagcaactcctgggggtcacgaaggtgtgttccaaggccacatctccaacctcacagagaggacaggaagtgatcagtaccccaactagcaagagtggcccgttcattggccgaggttcttgaggatagagtgggaggtgggagcgtccctcgtgctgccttcatnnnncctaccctcagctcaggggtctgtgctagaggaagacacacgaaggctactgtgcccccaccacaagagagggaaacagggagacgcgtgggtctggagccaagcgtatctctctgtacccatcgcacacgaatttgaatcatctgctctttggaatcgcctac

SEQ ID NO: 780 - DNA, 544 bp, Human
  unsure 234: unknown base
  unsure 340: unknown base
  unsure 404: unknown base
  unsure 416: unknown base
  unsure 420: unknown base
  unsure 427: unknown base
  unsure 467: unknown base
  unsure 480: unknown base
  unsure 490: unknown base
  unsure 496: unknown base
  unsure 507: unknown base
gctcaggttgaaagcttccaggaactgaatttcctgttgagatataaaggcccatctgatcactggattgggctgagcagagaacaaggccaaccatggaaatggataaatggtactgaatggacaagacagttagtcatgaaagaagatggtgccaacttgtatgttgcaaaggtttcacaagttcctcgaatgaatccaagacctgtcatggtttcctatcctgggagcagnagagtgtgcctatttgaatgacaaaggtgccagtagtgccaggcactacacagagaggaagtggatttgttccaaatcagatatacatgtctagatgttacagcanagccccaactaatctttagaagcatattggaactgataactccattttaaaatgagcaaagaanttatttcttatnaccnacaggtntatgaaaatatgctcaatatcactaataactgggaaaatncaaatcaaaatcntagtaaaatnttaccngttttcatggngctaatattacctgttctcccactgctaatgacatac

SEQ ID NO: 781 - DNA, 1973 bp, Human
ggcagtcgcaacccatactattcggacagatggcacagaaaccgctgcgcctcttggcttgtggagatgttgaaggaaagtttgatattttattcaatagagttcaagcaattcagaagaaaagtggaaactttgatctgctgttgtgtgtaggaaatttctttggctccacccaagatgctgaatgggaggagtataagactggcatcaagaaagttcctattcagacatatgtgcttggtgctaataaccaggaaacagtaaaatatttccaggatgctgatggatgtgaattagctgaaaacattacttatctgggtcgtaaaggtatcttcactggaagctcggggctgcagattgtgtacctcagtgggacagaatccttaaatgagccagtaccaggttatagttttagtcccaaggatgtgtcttctctgagaatgatgctgtgtacaacctcccagtttaagggtgttgatatcttgctcacatccccatggcccaagtgtgtggggaactttgggaattcttctggagaagtggataccaaaaaatgtggttctgctttggtttccagtcttgccacgggcttgaaaccaagataccattttgctgctttggaaaagacctattatgagaggcttccatatcgaaaccatatcattctacaggaaaatgcacagcatgccacccggtttatagctctggcaaatgttggaaatccagaaaagaaaaagtatctttacgcgttcagtattgttcccatgaagctaatggatgcagcagaactggtaaaacagcctccggatgtcactgaaaacccttacagaaaatctgggcaggaagcatccataggaaagcaaattcttgcccctgtggaagaatcagcctgtcagtttttctttgatttaaatgaaaagcagggaaggaagcgttcatccacaggtagagatagcaaatcttctcctcatccaaagcagcctcgcaaacctcctcagcctccaggaccctgctggttttgccttgctagccctgaagtggaaaaacatttggtggtcaacatcggcacacattgctaccttgccctggccaaaggaggcttatctgatgaccatgtcctcatcctgcctattggacactaccagtcagtggtggagctttcagcagaggtggtagaagaggtggagaagtataaggccactctgagacggttctttaagagtcgagggaaatggtgtgttgtatttgagagaaattataagagccatcacctccagctacaggtcattcctgtcccaatcagctgctctactactgatgacattaaagatgccttcattacccaggcacaggagcagcagatagagctgttggaaatcccagagcactctgacatcaagcagattgcacagccaggagcagcatatttttatgttgaacttgacacaggagaaaagcttttccacagaattaaaaagaattttcctttgcagtttggaagggaggtcctggccagtgaagccatccttaatgttcctgataagtctgactggaggcagtgtcagatcagcaaggaagacgaggagaccctggctcgccgcttccggaaagactttgagccctatgactttactctggatgactaaaacaaagggaagaactttttatgaactccacaggaagtagtaaagctttttttttttttttaattaaaagaattttttttgagacaaagtctcgctctgtcacccaagcaggattgcagtgagccaagatcgctccattgcactccagcctgggtgacagtgaaactccatctcaaaaataaaagaataaaagtatgtctgtcatccagctcctatgtctgttatccagctccaagtacagcttgtgtatatcaacattttcaaaaacctttaaactaccaaatgaaatccagatgtttttccatggaaaaaaaaaaaaaaaaaaaa

SEQ ID NO: 782 - DNA, 4696 bp, Human
ggcagaccgtcacgtgacgacgtcgattcgcgtgcggcagtggcgaagttgacaaaccccgcgaaaatcgactctttgcatcgcacattttgttgattttccctcgtttttctttctctctttcccccgtccatccgaaagagggttggaaaaaaacaaaacaaacaaacaaacaaaaaaaaaacctaacgctgttgggacccggaagcggaaagggcatctttgaggtcgatacttccgggtcattgggagagtgcgggattcctgggccgagagcgggtggctgagccgggacctcgcgtgattctcggaacccgaggagaagcggcgtccggggctatggctgtgactctggacaaagacgcttattatcggcgagtgaagagactgtacagcaattggcggaaaggagaagatgagtatgccaacgttgatgccattgttgtatcagtgggtgttgatgaagaaattgtttatgccaaatcaactgccttacagacatggctctttggttatgaactaactgatactatcatggtcttttgtgatgacaaaatcatctttatggccagcaagaaaaaagtggagttcttgaaacagattgccaacactaagggcaatgagaatgctaatggagcccctgccatcacactgctaatacgagaaaagaatgaaagtaataagagtagctttgacaaaatgattgaagccattaaagaaagcaagaatggcaagaagattggagtgttcagcaaagacaaattccctggagagttcatgaagagctggaatgactgcctcaacaaagaaggctttgacaaaatagatatcagtgcagttgtggcatataccatcgctgtaaaggaggatggggagctcaacctaatgaagaaagcagccagcatcacttctgaagtcttcaacaaattcttcaaggaaagagtcatggaaatagttgatgcagatgagaaagttcgacacagcaaactggctgagtctgtggaaaaggccattgaagagaaaaaataccttgctggggcagacccttctactgtggaaatgtgttaccctcctatcattcagagtggtggcaactataatctcaagttcagtgtggtgagtgacaagaatcatatgcactttggggctatcacttgtgccatgggtattcgcttcaagtcttactgctccaaccttgttcgcactttgatggttgatccttctcaagaagttcaagaaaattataactttttgctccagcttcaagaggagctgctgaaggaattaagacatggtgtgaagatatgtgacgtgtataacgctgtcatggacgtggttaaaaagcagaagccagaactgctgaacaaaattaccaaaaacctagggtttgggatgggaattgaattccgtgaaggctccctagtaatcaatagcaaaaatcaatacaaactgaagaaaggaatggttttcagcatcaatttaggattctcagacctgactaacaaggaggggaaaaagccagaagagaaaacctatgccctgttcattggtgacacagtgcttgtggatgaggatggcccagctactgttctcacttctgtgaagaagaaagtgaagaatgtggggattttcctaaagaatgaagatgaggaagaagaggaggaggagaaagatgaggcagaggaccttttgggaagaggttctcgggcagcattacttacagaaagaacaagaaatgaaatgactgcagaagagaagcgaagagcacatcagaaagaactagcggctcaactcaatgaagaagcaaagaggcgattgactgaacaaaagggagaacagcagattcagaaagctcgcaagtctaatgtgtcctataaaaacccatctctgatgcctaaggaaccgcatattcgggaaatgaagatctacatcgataagaaatatgagactgtaataatgcccgtgtttggcattgcaacaccgtttcacattgccacaatcaagaatataagtatgtccgtggaaggagattatacttacttgcgaatcaacttttattgcccaggcagtgctctgggcaggaatgaaggcaacatctttcctaaccctgaagcgacttttgtcaaggaaattacataccgagcatcaaatattaaggcacccggagaacagacagtaccagccttgaaccttcagaatgctttccgaattattaaagaagtacagaaacgttataaaactcgagaagctgaagagaaagagaaggaggggattgtaaaacaagactcactggtgatcaatctaaaccggagtaatccgaaactgaaagatctatacattcgcccaaatattgcccaaaagaggatgcaaggctcactggaggcccatgtcaatggcttccgcttcacatctgttcgaggagacaaagtggatattttgtacaataatattaagcatgctttgttccagccctgtgatggagaaatgattattgtcttgcactttcacctcaagaatgccatcatgtttgggaagaagcggcacacggatgtgcagttctacacagaagtgggagagataaccacggacttggggaaacatcagcatatgcatgaccgagatgacctctatgctgagcagatggaacgagaaatgaggcacaaactgaaaacagcctttaaaaatttcattgagaaagtagaggctctaactaaggaggaactggaatttgaagtgccttttagggacttgggatttaacggagctccctataggagtacctgcctccttcagcccactagtagtgcgctggtaaatgctacggaatggccaccttttgtggtgacattggatgaggtagagctgatccactttgagcgggtccagtttcacctgaagaactttgatatggtaatcgtctacaaggactacagcaagaaagtgaccatgatcaacgccattcctgtagcctctcttgaccccatcaaggaatggttgaattcctgcgacctgaaatacacagaaggagtacagtccctcaactggactaaaatcatgaagaccattgttgatgaccctgagggcttcttcgaacaaggtggctggtctttcctggagcctgagggtgaggggagtgatgctgaagaaggggattcagagtctgaaattgaagatgagacttttaatccttcagaagatgactatgaagaggaagaggaggacagtgatgaagattattcatcagaagcagaagagtcagactattctaaggagtcattgggtagtgaagaagagagtggaaaggattgggatgaactggaggaagaagcccgaaaagcggaccgagaaagtcgttacgaggaagaagaagaacaaagtcgaagtatgagccggaagaggaaggcatctgtgcacagttcgggccgtggctctaaccgtggttccagacacagctctgcaccccccaagaaaaagaggaagtaacttctgaactttggccctgagctccattcttcctccagccaacccctgaaaattttacatgacatagaaactgtatttttcctttcgttttcatttgaagttttgccatttgtgtttatgggtttagggggccatttgtgtggaccaatctactcggggaattccaggcccaccaggacacgtgccaatggccccattcagatggcaagggaggaggtgttcttgaagacaggaggaggctcccgctgttaataaatattgtttcattcttctctcttcctgtcaccttctgccaagacattgatggcttctgacatcttatttggtgtctcaaagctgtatttccaagacagtggtacaaggtgacccttaattacccgtatcatggttcttgaccagcacattcaatcctccaacctaccctactgccatgaccttccgcacatctctaagttttatctttgcaatactcaaggttctcggaaatttgctaatggttgtgataaaccatacagcttgagccagtgaggcagattgggctggtgccttcgtctgagttttcctgctttcctgcctcgtgcagattctgaggtatatctgctgccttggaagacataagaagcagtgatactccctggctcggttattttctccatacaatgcacacatggtacaatgatagaaggcaaaattgccactgtcttcttttttttctcatatatctaaggaagatatatcaggttgtgcctcatgtaccgcttctagtgaaatgtagaggaaggctcaaaggagtcaacatttagatctggaagggacaagtcatgccttgggcctagaataccctgatgagaaaagagaagaggaagggaggccatatctacaacacagcctctcggcactgctgctccttattttaactttgtcttgcattgtcctgtatttatcacagtttctgttgaacagcttttcaagtatttggggagtttatcttgccatcctccccttctggttctctgcacccacctgtcccactgcagttccttccgtgctctgtgactttaagagaagaaggggggaggggtcccggattttatgtttgtttgttttttctccttagcagtaggacttgatattttcaattttggaagaactaaaagatgaataaactgggttttttttgttgtttgtttttgtaaaaaaaaaaaaaaaaaaa

SEQ ID NO: 783 - protein, 1047 aa, Human
MAVTLDKDAYYRRVKRLYSNWRKGEDEYANVDAIVVSVGVDEEIVYAKSTALQTWLFGYELTDTIMVFCDDKIIFMASKKKVEFLKQIANTKGNENANGAPAITLLIREKNESNKSSFDKMIEAIKESKNGKKIGVFSKDKFPGEFMKSWNDCLNKEGFDKIDISAVVAYTIAVKEDGELNLMKKAASITSEVFNKFFKERVMEIVDADEKVRHSKLAESVEKAIEEKKYLAGADPSTVEMCYPPIIQSGGNYNLKFSVVSDKNHMHFGAITCAMGIRFKSYCSNLVRTLMVDPSQEVQENYNFLLQLQEELLKELRHGVKICDVYNAVMDVVKKQKPELLNKITKNLGFGMGIEFREGSLVINSKNQYKLKKGMVFSINLGFSDLTNKEGKKPEEKTYALFIGDTVLVDEDGPATVLTSVKKKVKNVGIFLKNEDEEEEEEEKDEAEDLLGRGSRAALLTERTRNEMTAEEKRRAHQKELAAQLNEEAKRRLTEQKGEQQIQKARKSNVSYKNPSLMPKEPHIREMKIYIDKKYETVIMPVFGIATPFHIATIKNISMSVEGDYTYLRINFYCPGSALGRNEGNIFPNPEATFVKEITYRASNIKAPGEQTVPALNLQNAFRIIKEVQKRYKTREAEEKEKEGIVKQDSLVINLNRSNPKLKDLYIRPNIAQKRMQGSLEAHVNGFRFTSVRGDKVDILYNNIKHALFQPCDGEMIIVLHFHLKNAIMFGKKRHTDVQFYTEVGEITTDLGKHQHMHDRDDLYAEQMEREMRHKLKTAFKNFIEKVEALTKEELEFEVPFRDLGFNGAPYRSTCLLQPTSSALVNATEWPPFVVTLDEVELIHFERVQFHLKNFDMVIVYKDYSKKVTMINAIPVASLDPIKEWLNSCDLKYTEGVQSLNWTKIMKTIVDDPEGFFEQGGWSFLEPEGEGSDAEEGDSESEIEDETFNPSEDDYEEEEEDSDEDYSSEAEESDYSKESLGSEEESGKDWDELEEEARKADRESRYEEEEEQSRSMSRKRKASVHSSGRGSNRGSRHSSAPPKKKRK

SEQ ID NO: 784 - DNA, 2081 bp, Human
ctaggccggcagccggatggtcccgcagctcggggccggccatgcttcgcggtccgtggcgccagctttggctctttctcctgctgctgctcccgggcgcgcctgagccccgcggcgcctccaggccgtgggagggaaccgacgagccgggctcggcctgggcctggccgggcttccagcgcctgcaggagcagctcagggcggcgggtgccctctccaagcggtactggacgctcttcagctgccaggtgtggcccgacgactgtgacgaggacgaggaggcagccacggggcccctgggctggcgccttcctctgttgggccagcggtacctggacctcctgaccacgtggtactgcagcttcaaagactgctgccctagaggggattgcagaatctccaacaactttacaggcttagagtgggacctgaatgtgcggctgcatggccagcatttggtccagcagctggtcctaagaacagtgaggggctacttagagacgccccagccagaaaaggcccttgctctgtcgttccacggctggtctggcacaggcaagaacttcgtggcacggatgctggtggagaacctgtatcgggacgggctgatgagtgactgtgtcaggatgttcatcgccacgttccactttcctcaccccaaatatgtggacctgtacaaggagcagctgatgagccagatccgggagacgcagcagctctgccaccagaccctgttcatcttcgatgaagcggagaagctgcacccagggctgctggaggtccttgggccacacttagaacgccgggcccctgagggccacagggctgagtctccatggactatctttctgtttctcagtaatctcaggggcgatataatcaatgaggtggtcctaaagttgctcaaggctggatggtcccgggaagaaattacgatggaacacctggagccccacctccaggcggagattgtggagaccatagacaatggctttggccacagccgtcttgtgaaggaaaacctgattgactacttcatccccttcctgcctttggagtaccgtcacgtgaggctgtgtgcacgggatgccttcctgagccaggagctcctgtataaagaagagacactggatgaaatagcccagatgatggtgtatgtccccaaggaggaacaactcttttcttcccagggctgcaagtctatttcccagaggattaactacttcctgtcatgaaggctagaggaagacttcctggaactgcctttcttccactaacaggaccctgggacctgtaggagcaccccgtttgggactgtgaggtgtttgagggtgtggactggcatccagcagccactaacaaacacacaactggtgtgtaaaaggcaggccttacattagaagccaagccaatcctttttcttttttttggaggtcccaccgagatagatagataggaacttggattgctgaattcaaaaacagagcccattcttaagatcacttggtgccttaaagacacgcattccaaagtggaatgtggttgaagaaagtgggccaggtggttgaagaaagccatgtgggagctcagcaaatcccaagggcttattatgacactccagatggtctccttagcatctcagctcttctgcaaggaagagcttgggtgttaggcctcagaggctgtagggtccttgggttacagagccggggagaacgaagttctgtgacccaggggtggagaatacactctaggtttgcgggctggtgggctttcaaattggtacttccagaggaaagccaagctgcttctgttgtgagcgaatcagccaagagcctgaggctgaagggaaaagtacacagaggaagatattttacaaaccaggtcagtgtaggccaagacttatggtctacagattttggcgggggaggggggaccttttcaaagacaatagggggtcttgacatgtttgttgtatgtaaagatgataagattaaaatttttgattttcctaaaaaaaaaaaaaaaaaaaaaaaaaaaaaaaaaaaaaaaaaaaaaaaaaaaaaaaaaaaaacctcggg

SEQ ID NO: 785 - DNA, 499 bp, Human
aacggtctggagtagacctccagcaaactccaacagacctgcagctgagggtcctgactgttagaaggaagactaacaaacagaaaggacatccacacaaaaaccccatctgtacgtcaccatcatcaaagaccaaaggtagataaaaccacaaagatggggaaaaaaacagagcagaaaaactggaaactctcaaaatcagagcgcctctcctcctctagaggaacgcggctcctcaccagtaacggaacaaagctggatggagaatgactttgacgagttgagagaagaaggcttcagacaatcaaactactctgagctaaaggaggaagtttgaacccatggcaaagaagttaaaaaccttgaaaaaaaaattagatgaatggctaactagaataatcaatgcagagaagtccttaaaggacctgatggagctgaaaaccaaggcatgagaactatgtgacgaatgcacaagcctcagtagctgattcgatcaact

SEQ ID NO: 786 - DNA, 144 bp, Human
gtggtgatgttgggcgttatgactatgtctccgggtaccaacaatacccaggcacagtccccaaatccatgatctacaatgtcgatattcagccctcaggggtccctcatcgtttctctgagtccaagtctggcaatacggcct

SEQ ID NO: 787 - DNA, 2214 bp, Human
ggcacgaggctaaatgtagacaatggttagagaagaattttccaaatgaatttgcaaaacttactgtagaaaattcacccaaacaagaagctggaattagtgagggtcaaggaacagcaggggaagaagaggagaagaaaaaacagaagagaggtggaaggggtcaaataaaacaaaaaaagaagaccgtaccacaaaaggttactatagccaaaattcccagagcaaagaagaaatatgtgacaagagtatgtggccttgcaacttttgaaattgatcttaaagaagcacaaagattttttgctcaaaaattctcctgtggtgcctcagtaacaggggaggatgaaattatcattcagggagattttacagatgacataattgatgtcattcaggaaaaatggccagaggtagatgatgacagcatcgaagatcttggagaagtaaagaagtgaatttgaaaatttgtctgtatttaatggcctgaactgagagttgatatggccaaagggagagaggccttttaaaatatatatatatatacacatatatatgtatatatacacatatatgtatgtatacacatatacacatgtatatatacatgtgtgtatgtatgcatgtatatacatatatacatacacatatatgtatacatatatacacatatatgtatacatatatacacatatatgtatacatatatatatattctacagtaaaactgtagactgtcctcgtccttggcattttcactgttctgtacaaggctgcttgtttttttattgccaaagtcaaataaacgggagactgtcatgctcatgcatgaatagaatttagtcaaataaaaaattttggtcatttggtactgactttctctctctctctctctctcttttttttttttgacagagtctcgcactgttgcctgggctggaatgcagtggtgcgatctcggctcactgcaacctccgcctcccgggttcaagtgattctcctgcctcagcctcccaagtaggtgggattacaggcgcccgccaccacgcccagctaatttttgtatttttagtagagatggggtttcactatgttggccaggctggtctcgaactcctgacctcgtgattggcccacctcagcctcccaaagtgctggtattacagatgtgagccaccgcacccagcctgagtttctctttctctctttttaactttattttttgaaaaacccggtagactttgtggggagcatttttgttgataattttactgatctaaagctgagtgattttttaaaagaatttgaatttggcttcctcaccagtaatatgtctccttgcttctttgatgtgatagttttgagatgggtgagaatctaatagatctgtggttgaatttgctgtgttgttatgaagtccaccctgtgggcacaataacataactgttggtaggagttgtttgagctattctggagattatttggtaaagtatactaaaagccttaaaaccatgtatgtgcgctgtttgaaccagtaagccacttctttgacattagaagacattagaagaaataatcagccttgcataaaacttatggatgaaagtattcatcacaatattatttataataaaaaattgcaaatgttataaatgaacaattgggaaatggttaaagaagtgatggtgcattgtgtggtagaatattatgcatatgtttaaagaatcatattttctaagattatttggaagcatgtttggtaatgtcaagtggagtaccccagatacattttagacatttatcgtcatcatctgctctgagtggaaggccgttcagagaggctagaggttcttattctggctataaattatgtgagtaaaattgtgctaaccagttaaaagtactgtacacccatgctcaatatatagtcctggaaatagcaattgaaacatgtcttctcacaagagaaaatgacagttttaatgatgtatttgatgaatttaaactttaagtcaggtgctgcaaattggaaagaagacttgtggtgttttaagttgctgtggacacttttaagaaacttagaacccatggaacccttgtttatcgccatgcaaattacaatcttgaatgagtgtttttttaaaaataaagtattagaaaaatgtgtagtaaagatgtaaaattaaaaaaaaaaaaaaaaaaaaaaaaaaaaaaaaa

SEQ ID NO: 788 - DNA, 492 bp, Human
ggtgtcaaggttttattgggtgtcataaaattagatgggaagtgctgtctccttccctgtttttggaaatagctgtgtaagatcggtatgatttcttctttacatgtttgataggatttaccagtgaaatcatctgaacctagagggttttatttggtttggttttagttttttgtgggagaagtaagattttttaagagatattttcagatttttctgttgtcagttttggtaatttgtgtcttttaggaaaatttcatttcatccaagttgttggatttattggcataaaatttttcagaatattcctttaatatccttttactgtctgtagaatctaatctgtattgcagtctcttcatattggtaatttgtgttttttctgttttttcctggatcagtcagtctagctggaggtttatcaattctttataagatcacttattttagatcattaatgatcttttagtacaggggtattcaatcttttag

SEQ ID NO: 789 - DNA, 1899 bp, Human
acacagctgggattctgtagtgtttatattgtcttcttagctgaaaatgtgaaacaagttcatgaaggattcctggagagtaaagtgtttatttcaaatagtaccaattcatcaaacccttgtgagagaagaagtgttgacctaaggatatatatgctttgctttcttccatttataattcttttggtcttcattcgtgaactaaagaatctatttgtactttcattccttgccaacgtttccatggctgtcagtcttgtgataatttaccagtatgttgtcaggaacatgccagatccccacaaccttccaatagtggctggttggaagaaatacccactcttttttggtactgctgtatttgcttttgaaggcataggagtggtccttccactggaaaaccaaatgaaagaatcaaagcgtttccctcaagcgttgaatattggcatggggattgttacaactttgtatgtaacattagctactttaggatatatgtgtttccatgatgaaatcaaaggcagcataactttaaatcttccccaagatgtatggttatatcaatcagtgaaaattctatattcctttgggcatttttgtggacatatttcaattccagttctatgttcccrgcagagatccattatcccgkgggrtcacatccaaatttcatactaaatgggargcaaatctgtggaatttkggggrtaagatcccttcttggttagtattacttgtgccggagcaattcttattcctcgtttagacattgtgatttccttcgttggagctgtgagcagcagcacattggccctaatcctgccacctttggttgaaattcttacattttcgaaggaacattataatatatggatggtcctgaaaaatatttctatagcattccactggagttgttggcttcttattaggtacatatataactgttgaagaaattatttatcctactcccaaagttgtagctggcactcccacagagtccttttctaaatttgaattcaacatgcttaacatctggtttgaaatagtaaaagccagaatcatgagtcttctatttttgtcccatttctgaaaattatcaagataactagtaaaatacattgctatatacataaaaatggtaacaaactctgttttctttggcacgatattaatattttggaagtaatcataactctttaccagtagtggtaaacctatgaaaaatccttgcttttaagtgttagcaatagttcaaaaaattaagttctgaaaattgaaaaaattaaaatgtaaaaaaattaaagaataaaaatacttctattawwmwwwtatctcagtaagaaataccttaaccaagatatctctcttttatgctactcttttgccactcacttgagaacagaataggatttcaacaataagagaataaaataagaacatgtataacaaaaagctctctccagatcatccctgtgaatgccaaagtaaactttatgtacagtgtaaaaaaaaaaaaatctcagttatgtttttattagccaaattctaatgattggctcctggaagtatagaaaactcccattaacataatataagcatcagaaaattgcaaacactagaattaattttacactctaatggtagttgatcttcatagtcaagaggcactgttcaagatcatgacttagtgtttcaatgaaatttgaaaagggactttaaaacttatccagtgcaactcccttgtttttcgtcagaggaaaaggaggcctagaaaggttaagtaacttggtcgagaccactcagccttgagatcaagaaaacctaatcttctgactcccaggccaggatgttttatttctcacatcatgtccaagaaaaagaataaattatgttcagctt

SEQ ID NO: 790 - protein, 225 aa, Human
  unsure 211: unknown amino acid
  unsure 218: unknown amino acid
  unsure 219: unknown amino acid
TQLGFCSVYIVFLAENVKQVHEGFLESKVFISNSTNSSNPCERRSVDLRIYMLCFLPFIILLVFIRELKNLFVLSFLANVSMAVSLVIIYQYVVRNMPDPHNLPIVAGWKKYPLFFGTAVFAFEGIGVVLPLENQMKESKRFPQALNIGMGIVTTLYVTLATLGYMCFHDEIKGSITLNLPQDVWLYQSVKILYSFGHFCGHISIPVLCSXQRSIIPXXHIQISY

SEQ ID NO: 791 - DNA, 10342 bp, Human
  unsure 907: unknown base
  unsure 908: unknown base
  unsure 909: unknown base
  unsure 910: unknown base
  unsure 911: unknown base
  unsure 912: unknown base
  unsure 913: unknown base
  unsure 914: unknown base
  unsure 915: unknown base
  unsure 916: unknown base
  unsure 917: unknown base
  unsure 918: unknown base
  unsure 919: unknown base
  unsure 920: unknown base
  unsure 921: unknown base
  unsure 922: unknown base
  unsure 923: unknown base
  unsure 924: unknown base
  unsure 925: unknown base
  unsure 926: unknown base
  unsure 927: unknown base
  unsure 928: unknown base
  unsure 929: unknown base
  unsure 930: unknown base
  unsure 931: unknown base
gggcaggtctagaattcagtggccgctgaattctagcggcgcgggtgcgggcgccggggacccgcagctcgtggccatgatcgtgaaccacctcaagagccaggggctcttcgaccagttccgcagagactgcctggccgacgtggacaccaagcctgcgtatcagaatctgagacagcgtgttgacaactttgttgcaaatcacttggcaactcacacatggagtccgcatctcaataagaaccagctaagaaacaacattagacaacaagtcctcaaatcaggaatgttggagtctggtattgaccgaattatttctcaggttgtggacccaaagatcaaccacacattcagacctcaggtagagaaagctgtgcatgagtttttggccacgctaaatcacaaagaggaaggaagtggcaacacagctcccgatgatgagaaaccagacacttcccttattacacaaggtgttcctactcctgggcccagtgctaatgtagccaatgatgccatgtcgatattggaaaccataacttctcttaaccaagaagccagtgctgctagggcttcaacagaaacatcaaatgccaagaccagtgagagagcgtcaaaaaaacttccatctcagccaaccactgatactagtactgacaaagaaagaacttcagaggacatggctgataaagaaaaatctacagctgactctggaggtgaaggactggaaacagccccaaagtctgaagagttcagcgacctcccctgtccagtcgaagaaattaaaaattacacaaaagagcataataatttaattctgctaaataaggatgttcaacaggaaagcagtgagcaaaaaaataaatcaacagacaaaggtgaaaagaagccagacagcaatgagaaaggnnnnnnnnnnnnnnnnnnnnnnnnnaagactgaaaagaaatttgatcactcaaaaaagagtgaagatacacagaaagttaaagatgaaaaacaagcaaaggaaaaagaagtagagagtttaaaacttccttcagaaaagaacagtaataaagctaaaactgttgaagggacaaaagaagatttctctttgatagattctgatgtggatggacttacagacatcacagttagctctgttcataccagtgacctttcatcttttgaagaagatactgaggaggaagttgtaacgtctgatagcatggaagaaggagagattacgtcagatgatgaagagaagaacaaacagaataaaacaaaaactcaaactagtgattctagtgaaggaaaaacaaaaagtgtacggcatgcgtatgtccacaaaccatatctttactcaaaatactatagtgattctgatgatgagcttactgtagaacaacgacgacagtccattgccaaagaaaaagaagagaggcttttaagaaggcaaatcaatagagaaaaacttgaagaaaaacgaaaacagaaagcagaaaagacaaagtcttcaaaaaccaagggtcaaggcaggagtagtgtggacttagaagaatcatcaacaaagagtttggaacctaaagccgccagaattaaagaagtccttaaagaacggaaagttttagaaaaaaaagtagccttaagcaaaaagagaaaaaaagattcaaggaatgttgaagagaactccaaaaagaaacagcaatatgaagaagattccaaagaaacccttaaaacaagtgagcattgtgaaaaggaaaaaatttcttcttcaaaggagctgaagcatgttcatgcaaaaagtgaaccaagtaaacctgcccggagactttcagagtctttgcatgtagttgacgaaaacaaaaatgaatccaaaatagaaagagaacataaaagacggacatctacccctgttatcatggagggggtacaggaagagactgacacaagagatgtaaaaaggcaagtagaacgctcagaaatttgcaccgaagagccccagaaacagaaaagcacacttaaaaacgaaaagcatctaaagaaagatgattctgaaacaccacatttgaaaagcctacttaagaaagaggtgaaatcctccaaggagaagcctgaaagagagaaaactccatcggaagacaaattgtctgtgaaacataaatataaaggtgattgtatgcataaaacaggtgatgagactgagcttcactcttctgagaaaggtttaaaagtagaggaaaatattcaaaagcaaagtcaacaaacaaagctttcttcagatgataaaaccgaacgaaaaagtaaacataggaatgaaaggaaattatcagtattaggcaaagatggaaagccagtttctgaatatattataaaaacagatgagaatgttcgtaaagaaaacaacaaaaaagagagacgcttgtcagctgaaaaaactaaggcagagcacaaatcaagaaggtcaagtgattctaaaattcagaaagattctctgggttccaagcaacatggtatcacattacagagaagaagtgaaagttattcggaagataagtgtgatatggactccactaacatggatagtaatttgaaaccagaagaggttgttcacaaggagaaacgacgaacaaagagcttgttagaagagaaacttgtgttgaagtctaaatcaaaaactcaaggcaaacaggtaaaagttgtagaaacagaattacaagaaggtgccacaaaacaggcaaccactccaaaaccagacaaggagaagaacacagaagaaaatgactcagaaaaacagcgtaagtctaaagttgaagacaaaccttttgaagaaactggtgttgaacctgtattagagactgcttcttcttcagcacatagtacacagaaggattctagtcatagagccaagttaccattagcaaaggagaaatataagagtgataaagactccacttccaccaggcttgagagaaagttgtcagatggccacaaaagcagaagcttaaagcatagtagtaaagacataaaaaagaaggacgaaaataaatcagatgacaaggatggtaaagaagttgacagtagtcatgaaaaggccagaggtaatagttcactcatggaaaagaaattaagtagaaggttgtgcgaaaatcggagaggaagcttgtcacaagaaatggccaaaggagaagaaaaattagcagcaaacactttgagcactcccagcggttcctcccttcagagaccaaaaaagagtggtgatatgacattgatccctgaacaagagccaatggaaattgattctgagccaggtgttgaaaatgtgtttgaagtatctaaaacccaagacaaccgcaataataattctcagcaagacattgactctgaaaatatgaaacaaaaaacttctgccactgttcaaaaggatgaattgagaacttgcacagcagattcaaaagcaacagctccagcttataagccaggccgtggaacaggagttaatagtaattctgaaaagcatgccgatcatagaagcaccttgaccaagaaaatgcatatacaaagtgctgtgtccaaaatgaaccctggggagaaagaacccattcatagaggaactactgaagtgaatatagattctgaaactgttcatagaatgttactgagtgccccatcagaaaatgatagggtacagaagaatttgaaaaacacagctgctgaagaacatgttgctcaaggagatgccactcttgaacattccacaaatttagactcctcaccatccttaagttcagtgactgttgtgcctctgagggaatcgtatgatccagatgtaattcctctgtttgacaaaagaactgttttggaaggtagcacagccagcacctcccctgcggatcactctgctctccctaaccaaagtctgactgttagggaatcagaagtccttaagacaagtgacagcaaagaaggtggtgaaggtttcacagtagatacaccagcaaaagcaagcatcactagcaaaagacacattccagaagctcaccaggctactttattggatggtaaacaaggaaaggtaatcatgcctcttggaagtaagttaacgggcgtgattgtggaaaatgagaatattaccaaagaaggtggcttagtggacatggccaagaaagaaaatgacttaaatgcagagcccaatttaaagcagacaattaaagcaacagtagagaatggcaagaaggatggcattgctgttgatcatgttgtaggcctgaatacagaaaaatatgctgaaactgtcaaacttaagcataaaagaagcccaggtaaagtaaaagacatatcaattgatgttgaaagaaggaatgaaaacagtgaggtagacaccagtgctggaagtggctctgcaccctctgttttacaccaaaggaacggacaaactgaggatgtggcaactgggcctaggagagcagaaaagacttctgttgccactagtactgaagggaaggacaaagatgtcaccttaagtccagtgaaggctgggcctgccacaaccacttcttcagaaacaagacaaagtgaggtggctttgccttgcaccagcattgaggcagatgaaggcctcataataggaacacattccagaaataatcctcttcatgttggtgcagaagccagtgaatgcactgtttttgctgcagctgaagaaggtggggctgttgtcacagagggatttgctgaaagtgaaaccttcctcacaagcactaaggaaggggaaagtggggagtgtgctgtggctgaatctgaggacagagcagcagacctactggctgtgcatgcagttaaaatcgaagccaatgtaaatagcgttgtgacagaggaaaaggatgatgctgtaaccagtgcaggctctgaagaaaaatgtgatggttctttaagtagagactcagaaatagttgaaggaactattacttttattagtgaagttgaaagtgatggagcagttacaagtgctggaacagagataagagcaggatctataagcagtgaagaggtggatggctcccagggaaatatgatgagaatgggtcccaaaaaagaaacagagggcactgtgacatgtacaggagcagaaggcagaagtgataactttgtgatctgctcagtaactggagcagggccccgggaggaacgcatggttacaggtgcaggtgttgtcctgggagataatgatgcaccaccaggaacaagtgccagccaagaaggagatggttctgtgaatgatggtacagaaggtgagagtgcagtcaccagcacggggataacagaagatggagaggggccagcaagttgcacaggttcagaagatagcagcgaaggctttgctataagttctgaatcggaagaaaatggagagagtgcaatggacagcacagtggccaaagaaggcactaatgtaccattagttgctgctggtccttgtgatgatgaaggcattgtgactagcacaggcgcaaaagaggaagacgaggaaggggaggatgttgtgactagtactggaagaggaaatgaaattgggcatgcttcaacttgtacagggttaggagaagaaagtgaaggggtcttgatttgtgaaagtgcagaaggggacagtcagattggtactgtggtagagcatgtggaagctgaggctggagctgccatcatgaatgcaaatgaaaataatgttgacagcatgagtggcacagagaaaggaagtaaagacacagatatctgctccagtgcaaaagggattgtagaaagcagtgtgaccagtgcagtctcaggaaaggatgaagtgacaccagttccaggaggttgtgagggtcctatgactagtgctgcatctgatcaaagtgacagtcagctcgaaaaagttgaagataccactatttccactggcctggtcgggggtagttacgatgttcttgtatctggtgaagtcccagaatgtgaagttgctcacacatcaccaagtgaaaaagaagatgaggacatcatcacctctgtagaaaatgaagagtgtgatggtctcatggcaactacagccagtggtgatattaccaaccagaatagcttagcagggggtaaaaatcaaggcaaagttttgattatttccaccagtaccacaaatgattacacccctcaggtaagcgcaattacagatgtggaaggaggtctctcagatgctctgagaactgaagaaaatatggaaggtaccagagtaaccacagaagaatttgaggcccccatgcccagtgcagtctcaggagatgacagccaactcactgccagcagaagtgaagagaaagatgagtgtgccatgatttccacaagcataggggaagaattcgaattgcctatctccagtgcaacaaccatcaagtgtgctgaaagtcttcagccggttgctgcagcagtggaagaaagggctacaggtccagtcttgataagcaccgccgactttgaggggcctatgcccagtgcgcccccagaagctgaaagtcctcttgcctcaaccagcaaggaggagaaggatgaatgtgctctcatttccactagcatagcagaagaatgtgaggcttctgtttccggtgtagttgttgaaagtgaaaatgagcgagctggcacagtcatggaagaaaaagacgggagtggcatcatctctacgagctcggtggaagactgtgagggcccagtgtccagtgctgtccctcaagaggaaggcgacccctcagtcacaccagcggaagagatgggtgacaccgccatgatttccacaagcacctctgaagggtgtgaagcagtcatgattggtgctgtcctccaggatgaagatcggctcaccatcacaagagtagaagacttgagcgatgctgccatcatctccaccagcacagcagaatgtatgccaatttccgccagcattgacagacatgaagagaatcagctgactgcagacaacccagaagggaacggtgacctgtcagccacagaagtgagcaagcacaaggtccccatgcccagcctaattgctgagaataactgtcggtgtcctgggccagtcaggggaggcaaagaaccgggtcccgtgttggcagtgagcaccgaggaggggcacaacgggccatcagtccacaagccctctgcagggcaaggccatccaagtgctgtttgtgcggaaaaagaagagaagcatggcaaggagtgccccgaaataggaccatttgcaggaagaggacagaaagagagcactttacacctcataaatgcagaagagaagaatgtattgttgaactcccttcagaaagaagataagagcccagagacagggacagcagggggcagtagcacagcaagttattcagcaggaaggggcttagaggggaatgctaactcacctgcccacctgagaggaccagaacagacgtctgggcagacggctaaggatccctctgtcagcattcgctatttggcagcagtaaacaccggtgctataaaagctgatgacatgccacctgttcaagggaccgtggctgagcattcctttcttcctgctgagcagcaggggtctgaagacaacttgaaaaccagtaccaccaaatgtattactggccaagaatcaaaaattgctccttcccacacaatgatccctccagctacttacagtgtagctctgttggctcctaaatgtgagcaggacttgactataaagaatgattatagtggcaaatggactgatcaagcatctgctgagaaaacaggagatgataacagcacaaggaaatcattccctgaggaaggagacataatggttactgtgtcttctgaagaaaatgtgtgtgacataggcaatgaagagtctccattgaatgttttgggaggattgaaactgaaagccaacttgaaaatggaggcttatgtgccttcagaggaagagaaaaatggtgaaattctggcaccaccagaaagtctgtgtgggggaaagccaagtggaatagctgaactccagagggagcctttgttggtgaatgaatcactaaatgttgaaaattcaggcttcagaacaaatgaagaaattcatagcgaatcttataacaaaggagagatatccagtggtagaaaagacaacgcagaagccataagcggtcacagtgttgaagcagatcctaaagaggttgaagaggaagaaaggcatatgcctaaaagaaaaagaaagcagcattatctctcttcagaagatgaaccagatgataatccagatgtcctggattccagaatagaaacagcacaaaggcagtgtcctgaaacggagccacatgacacaaaggaagagaactccagagatttggaagaattacctaaaaccagttctgagacaaatagcactacctcaagggtcatggaagaaaaagatgaatatagcagcagtgaaactactggtgaaaagccagagcagaacgatgatgacaccataaaatctcaggaggaagatcagccaataattattaaaaggaaaagaggaagacctcgcaaataccctgtagaaacaacgttaaaaatgaaagacgactccaaaacagatactggcattgtcactgtagaacaatctccatctagcagcaaactgaaagtaatgcaaacagatgaatccaataaagaaacagctaacctacaagaaagaagtataagcaatgatgatggtgaagaaaaaatagtaacaagtgtgcgtcggagaggaagaaaacccaaacgttctctcactgtatcagatgatgctgaatcctcagagccagaaagaaaacgccagaaatcagtttctgatccagtggaggacaagaaagagcaggagtctgatgaggaagaggaagaagaggaagaggacgagccttcaggagccaccacaagatccaccaccagatcagaggctcagagatcaaagacacagctctccccttctatcaagcgcaagagagaagtcagccctcctggggcccgaacaagaggccagcaaagggtggaggaagcccctgtgaaaaaagcgaagcgataatcctgaccactgctgccctaggcttatggaggaacacggtggagaggaaagagacatgccttggtggccataggcttctctttaaccaggaaaaagatatgcatgtgctgtaagtccctaggtgcaagctttttcttgttatgttttaaacagctttataaactattgttcatagaagatattatgtacatttatttcagataaaggacaataagtttactttgtatctgaactcaaaacaaagtagttgtatattttaacattcaaaattgggatttcccaatgtgacacatcatgaatgcaaacccctccagcccatcagacgccaggctgcctactggtaatctgtgtatagtatataaacatgtaaaaataggttgtattttactctatgtatgatgctaatcaatgaacactttatttattttacagagaaaacttatctgtgaactttactatatatctgtttattttactttattttttgtttaaataaaaagggttttaaatgctatgcagtcattagtagaaaattttttaggactctgcctgctctgtaactatcttaatatgatctggcagaaactcgcatgtatccaagtaaagtagtttagctaaagaaaggttcttcattgcttttctgttcacagttgtggctctgttttttaagaatgtaacttgtttttagattatacttgcatctgtgactttactaccagccacgttgacacaaaacaggttctggttcaggtaaagttgcgtcagtcacctgcagcagaaatccctcttcattcctcttctctgtgttcattcctcttctgtgctgttctgaagcttctaccaatactctttccatattgtctttttcagtgaagagaaatgcattcaagattaggtccctcctgtctatccagtttcaggattttatgttgttttatacacagttatttcagtatagaaactggctttattgccaagtgtttttttaaacatgttttaactctcatatgagcaaactgtccaacttcagtttttcataagattaaacttcttacgatcaaatttgtctcttgcaatgatgtgatgagttgccaaataattgagattattttaaaatgttttgttcatattcttgttttataattaaaatttacattcagtgtgtatgggtttttttttttattttgactcttaatgtaaggtggatatttctgtcattttacatggtttcttactgagattttatatataaattataaaatgtttaccaaaaaa

SEQ ID NO: 792 - DNA, 378 bp, Human
  unsure 40: unknown base
  unsure 76: unknown base
  unsure 77: unknown base
  unsure 78: unknown base
  unsure 79: unknown base
  unsure 125: unknown base
  unsure 162: unknown base
  unsure 265: unknown base
gttgctaggattagagcctctcagtctggcctcttcaccnaagtgcaagaactcagtctcttactgttcaaagaannnntcttaacagttgaattatggagggaaattcccttttgccccaagcntttctatatttaaagcaatatcccaggagaatatgtnagacttaggatgataccttcagccacttgaagaagaaatagaaggcgctcattccaatatagtctttatttcccattcagatacaggttgagcatccctaatntgaacagttaaaacccccaaatgccccaaaatccaaaccttcctgaacgctatgacaccatgagtggaaaattccacacctaacaaacacatttgctttcttatggttcaatg

SEQ ID NO: 793 - DNA, 862 bp, Human
gatatgggactacattcaagatgaatttggtggggacgcaccaaaccatatcgggtagcaacaacctagggtcagttttgcaggtggtaaagccatttaccaagatagttgtaggtaaagaagggcagatttattagagaaattgtgaaaatatgttgcagtgggcagctcagcagagaaggggctacctgcaaagaggcaagggctggaggaaagttttatagggtcctgctgaagggtgctacgtgtggaatgaggtcattgtgcccgcaggttgtttgtgattagctgtctctaacaattgttcatacaataattgttcattattgttctcaacttggggctctccccaacctggggacccttccttattgttgcttacttatcaggtctccacataaaggtgtggaaacttcattcattcatatcttcaacacaaattgtaggtagcctgttttttaaaacatttattcaacaaatatttagtccaagccactattacttactaccttctctactattgtatggacttttaactatctctgacactattcactattcttccacattctctattatttatacctatggtaaaatttgccagtttgaccatacaactaatactcacagggaatatatagagtctagaagaaaatatacaggtccttaaaggctgccctgccaacaaaaccataacgcaggaacaaacatcacaactatgccaaataatcaatcctacaatgtccaaaattttactttaaaactggaattaccagacttcctttctgcattaaccagtttaactagacagtaacgaaatattcctactttatgctgtgatagtttgtttgttgtttgtttg

SEQ ID NO: 794 - protein, 44 aa, Human [sequence omitted]

SEQ ID NO: 795 - DNA, 7231 bp, Human
  unsure 5584: unknown base
  unsure 5585: unknown base
  unsure 5586: unknown base
  unsure 5587: unknown base
  unsure 5588: unknown base
  unsure 5589: unknown base
  unsure 5590: unknown base
  unsure 5591: unknown base
  unsure 5592: unknown base
  unsure 5593: unknown base
  unsure 5594: unknown base
  unsure 5595: unknown base
  unsure 5596: unknown base
  unsure 5597: unknown base
  unsure 5598: unknown base
  unsure 5599: unknown base
  unsure 5600: unknown base
  unsure 5601: unknown base
  unsure 5602: unknown base
  unsure 5603: unknown base
  unsure 5604: unknown base
  unsure 5605: unknown base
  unsure 5606: unknown base
  unsure 5607: unknown base
  unsure 5608: unknown base
  unsure 5609: unknown base
  unsure 5610: unknown base
  unsure 5611: unknown base
  unsure 5612: unknown base
  unsure 5613: unknown base
  unsure 5614: unknown base
  unsure 5615: unknown base
  unsure 5616: unknown base
  unsure 5617: unknown base
  unsure 5618: unknown base
  unsure 5619: unknown base
  unsure 5620: unknown base
  unsure 5621: unknown base
  unsure 5622: unknown base
  unsure 5623: unknown base
cgcccgagctggcctgcgagttcagggctcctgtcgctctccaggagcaacctctactccggacgcacaggcattccccgcgcccctccagccctcgccgccctcgccaccgctcccggccgccgcgctccggtacacacaggatccctgctgggcaccaacagctccaccatggggctggcctggggactaggcgtcctgttcctgatgcatgtgtgtggcaccaaccgcattccagagtctggcggagacaacagcgtgtttgacatctttgaactcaccggggccgcccgcaaggggtctgggcgccgactggtgaagggccccgacccttccagcccagctttccgcatcgaggatgccaacctgatcccccctgtgcctgatgacaagttccaagacctggtggatgctgtgcgggcagaaaagggtttcctccttctggcatccctgaggcagatgaagaagacccggggcacgctgctggccctggagcggaaagaccactctggccaggtcttcagcgtggtgtccaatggcaaggcgggcaccctggacctcagcctgaccgtccaaggaaagcagcacgtggtgtctgtggaagaagctctcctggcaaccggccagtggaagagcatcaccctgtttgtgcaggaagacagggcccagctgtacatcgactgtgaaaagatggagaatgctgagttggacgtccccatccaaagcgtcttcaccagagacctggccagcatcgccagactccgcatcgcaaaggggggcgtcaatgacaatttccagggggtgctgcagaatgtgaggtttgtctttggaaccacaccagaagacatcctcaggaacaaaggctgctccagctctaccagtgtcctcctcacccttgacaacaacgtggtgaatggttccagccctgccatccgcactaactacattggccacaagacaaaggacttgcaagccatctgcggcatctcctgtgatgagctgtccagcatggtcctggaactcaggggcctgcgcaccattgtgaccacgctgcaggacagcatccgcaaagtgactgaagagaacaaagagttggccaatgagctgaggcggcctcccctatgctatcacaacggagttcagtacagaaataacgaggaatggactgttgatagctgcactgagtgtcactgtcagaactcagttaccatctgcaaaaaggtgtcctgccccatcatgccctgctccaatgccacagttcctgatggagaatgctgtcctcgctgttggcccagcgactctgcggacgatggctggtctccatggtccgagtggacctcctgttctacgagctgtggcaatggaattcagcagcgcggccgctcctgcgatagcctcaacaaccgatgtgagggctcctcggtccagacacggacctgccacattcaggagtgtgacaagagatttaaacaggatggtggctggagccactggtccccgtggtcatcttgttctgtgacatgtggtgatggtgtgatcacaaggatccggctctgcaactctcccagcccccagatgaacgggaaaccctgtgaaggcgaagcgcgggagaccaaagcctgcaagaaagacgcctgccccatcaatggaggctggggtccttggtcaccatgggacatctgttctgtcacctgtggaggaggggtacagaaacgtagtcgtctctgcaacaaccccacaccccagtttggaggcaaggactgcgttggtgatgtaacagaaaaccagatctgcaacaagcaggactgtccaattgatggatgcctgtccaatccctgctttgccggcgtgaagtgtactagctaccctgatggcagctggaaatgtggtgcttgtccccctggttacagtggaaatggcatccagtgcacagatgttgatgagtgcaaagaagtgcctgatgcctgcttcaaccacaatggagagcaccggtgtgagaacacggaccccggctacaactgcctgccctgccccccacgcttcaccggctcacagcccttcggccagggtgtcgaacatgccacggccaacaaacaggtgtgcaagccccgtaacccctgcacggatgggacccacgactgcaacaagaacgccaagtgcaactacctgggccactatagcgaccccatgtaccgctgcgagtgcaagcctggctacgctggcaatggcatcatctgcggggaggacacagacctggatggctggcccaatgagaacctggtgtgcgtggccaatgcgacttaccactgcaaaaaggataattgccccaaccttcccaactcagggcaggaagactatgacaaggatggaattggtgatgcctgtgatgatgacgatgacaatgataaaattccagatgacagggacaactgtccattccattacaacccagctcagtatgactatgacagagatgatgtgggagaccgctgtgacaactgtccctacaaccacaacccagatcaggcagacacagacaacaatggggaaggagacgcctgtgctgcagacattgatggagacggtatcctcaatgaacgggacaactgccagtacgtctacaatgtggaccagagagacactgatatggatggggttggagatcagtgtgacaattgccccttggaacacaatccggatcagctggactctgactcagaccgcattggagatacctgtgacaacaatcaggatattgatgaagatggccaccagaacaatctggacaactgtccctatgtgcccaatgccaaccaggctgaccatgacaaagatggcaagggagatgcctgtgaccacgatgatgacaacgatggcattcctgatgacaaggacaactgcagactcgtgcccaatcccgaccagaaggactctgacggcgatggtcgaggtgatgcctgcaaagatgattttgaccatgacagtgtgccagacatcgatgacatctgtcctgagaatgttgacatcagtgagaccgatttccgccgattccagatgattcctctggaccccaaagggacatcccaaaatgaccctaactgggttgtacgccatcagggtaaagaactcgtccagactgtcaactgtgatcctggactcgctgtaggttatgatgagtttaatgctgtggacttcagtggcaccttcttcatcaacaccgaaagggacgatgactatgctggatttgtctttggctaccagtccagcagccgcttttatgttgtgatgtggaagcaagtcacccagtcctactgggacaccaaccccacgagggctcagggatactcgggcctttctgtgaaagttgtaaactccaccacagggcctggcgagcacctgcggaacgccctgtggcacacaggaaacacccctggccaggtgcgcaccctgtggcatgaccctcgtcacataggctggaaagatttcaccgcctacagatggcgtctcagccacaggccaaagacgggtttcattagagtggtgatgtatgaagggaagaaaatcatggctgactcaggacccatctatgataaaacctatgctggtggtagactagggttgtttgtcttctctcaagaaatggtgttcttctctgacctgaaatacgaatgtagagatccctaatcatcaaattgttgattgaaagactgatcataaaccaatgctggtattgcaccttctggaactatgggcttgagaaaacccccaggatcacttctccttggcttccttcttttctgtgcttgcatcagtgtggactcctagaacgtgcgacctgcctcaagaaaatgcagttttcaaaaacagactcagcattcagcctccaatgaataagacatcttccaagcatataaacaattgctttggtttccttttgaaaaagcatctacttgcttcagttgggaaggtgcccattccactctgcctttgtcacagagcagggtgctattgtgaggccatctctgagcagtggactcaaaagcattttcaggcatgtcagagaagggaggactcactagaattagcaaacaaaaccaccctgacatcctccttcaggaacacggggagcagaggccaaagcactaaggggagggcgcatacccgagacgattgtatgaagaaaatatggaggaactgttacatgttcggtactaagtcattttcaggggattgaaagactattgctggatttcatgatgctgactggcgttagctgattaacccatgtaaataggcacttaaatagaagcaggaaagggagacaaagactggcttctggacttcctccctgatccccacccttactcatcacctgcagtggccagaattagggaatcagaatcaaaccagtgtaaggcagtgctggctgccattgcctggtcacattgaaattggtggcttcattctagatgtagcttgtgcagatgtagcaggaaaataggaaaacctaccatctcagtgagcaccagctgcctcccaaaggaggggcagccgtgcttatatttttatggttacaatggcacaaaattattatcaacctaactaaaacattccttttctcttttttcctgaattatcatggagttttctaattctctcttttggaatgtagattttttttaaatgctttacgatgtaaaatatttattttttacttattctggaagatctggctgaaggattattcatggaacaggaagaagcgtaaagactatccatgtcatctttgttgagagtcttcgtgactgtaagattgtaaatacagattatttattaactctgttctgcctggaaatttaggcttcatacggaaagtgtttgagagcaagtagttgacatttatcagcaaatctcttgcaagaacagcacaaggaaaatcagtctaataagctgctctgccccttgtgctcagagtggatgttatgggattctttttttctctgttttatcttttcaagtggaattagttggttatccatttgcaaatgttttaaattgcaaagaaagccatgaggtcttcaatactgttttaccccatcccttgtgcatatttccagggagaaggaaagcatatacacttttttctttcatttttccaaaagagaaaaaaatgacaaaaggtgaaacttacatacaaatattacctcatttgttgtgtgactgagtaaagaatttttggatcaagcggaaagagtttaagtgtctaacaaacttaaagctactgtagtacctaaaaagtcagtgttgtacatagcataaaaactctgcagagaagtattcccaataaggaaatagcattgaaatgttaaatacaatttctgaaagttatgtttttttttctatcatctggtataccattgctttatttttataaattattttctcattgccattggaatagatatctcagattgtgtagatatgctatttaaataatttatcaggaaatactgcctgtagagttagtatttctatttttatataatgtttgcacactgaattgaagaattgttggttttttctnnnnnnnnnnnnnnnnnnnnnnnnnnnnnnnnnnnnnnnngacctcccatttttactatttgccaatacctttttctaggaatgtgcttttttttgtacacatttttatccattttacattctaaagcagtgtaagttgtatattactgtttcttatgtacaaggaacaacaataaatcatatggaaatttatatttatacttactgtatccatgcttatttgttctctactggctttatgtcatgaagtatatgcgtaaataccattcataaatcaatatagcatatacaaaaataaattacagtaagtcatagcaacattcacagtttgtatgtgattgagaaagactgagttgctcaggcctaggcttagaatttgctgcgtttgtggaataaaagaacaaaatgatacattagcctgccatatcaaaaacatataaaagagaaattatccctaagtcaagggcccccataagaataaaatttcttattaaggtcattagatgtcattgaatccttttcaaagtgcagtatgaaaacaaagggaaaaacactgaagcacacgcaactctcacagcgacattttctgacccacgaatgatgccttgggtgggcaacacgattgcatgttgtggagacacttcggaagtaaatgtggatgagggaggagctgtccttgcaatgttgagccaagcattacagatacctcctcttgaagaaggaataataagtttaatcaaaaaagaagactaaaaaatgtaaaatttggaaggaatccataaatgcgtgtgtgtctaaatacaaattatcatgtgaagaaaaggcccaagtgtaccaataagcagaccttgatttttggatgggctaattatgaatgtggaatactgaccagttaatttccagttttaatgaaaacagatcaaagaagaaattttatgagtaggttaaaggtctggctttgaggtctattaaacactagaaaggactggctgggtgagataaaatcttccttgttgattttcactctcattctataaatactcatctttctgagtagccatgatcacatacaaatgtaaattgccaaatcattttatagtaccaaggtgaagaagcaggaactagaaagtgttgataatagctgtggagttaggaaaactgatgtgaaggaaataattctttgaaatggcaaagaattaaataccatcattcattatcagaagagttcaacgtttgaagtgctgggagataattctaattcattcttggatagtgaagcaaaactgattgaaaataccaagataagacagaaaaagtgactggaaagaggagcttttcttccaggcatgttccagtttcaccctaagactgaccttcaaataatcaggttgtactgaaataaaggacttgttaaaaattaaaattatgtcatcgagatgatagcttttttcctcctccaacagtttattgtcatgtgttgtgggagagctcgagtgaagagcaataaactccaggtcttataagaatgtacatacaataaaggtggtgccagcagtttttttttttctaaagagtcacatgtagaaaagcctccagtattaagctcctgaattcattccttaaataaattggctctctctctcttcaa

SEQ ID NO: 796 - DNA, 192 bp, Human
  unsure 69: unknown base
  unsure 97: unknown base
  unsure 167: unknown base
ggtctgagtggtttttccttcttgatggctcaatgacagagactagctcgtaaactccggggcgtttcngggctgttcgctcctgcttggcaatgtngcgagaaaggttttcgcctcctgtttcagcggtgacggctcttgggttttctcggggtggctttttaatnttagtcttggcgcgaggcgggggat

SEQ ID NO: 797 - DNA, 510 bp, Human
  unsure 65: unknown base
  unsure 125: unknown base
  unsure 139: unknown base
  unsure 145: unknown base
  unsure 152: unknown base
  unsure 161: unknown base
  unsure 165: unknown base
  unsure 223: unknown base
agctcatcaaatccttgatgtcttcaaatagacttttctccctctctagctcttctagtagttgntggtgagaggttggtctgataaaagtaatctaccctggctagacatctgctgctaataantaaacctactaaantaaagntttaagnatttatttngcanattttttttaccttagaatttatcccatgagaaatgtagaatcaggttactatattcnaaaattacttgacataattatttttaaaaattttaaaaggtaagaaacaacctttttaaatttaagaattaagagactaagaaattgagaattatttcaaaactcaaaaaatgttgaaggctttaaaaatgagtaagataaaatgtaaggtaaatgaaatgaatgtaggcattttgaagattagaaatttagccgtaggtaaagaatacaaaggaaaaataattttaaaatcatcaaccagatcaacaaaatatatgttaatgccgagactttgaattagagtgcga

SEQ ID NO: 798 - DNA, 3324 bp, Human
aaggcgcgagcctgcgttttccggccagaggacatgatgcagggggaggcacaccctagtgcttcccttattgacagaaccatcaagatgagaaaagaaacagaggctaggaaagtggtcttagcctggggactcctaaatgtatctatggctggaatgatatatactgaaatgactggaaaattgattagttcatactacaatgtgacatactggcccctctggtatattgagcttgcccttgcatctctcttcagccttaatgccttatttgatttttggagatatttcaaatatactgtggcaccaacaagtctggttgttagtcctggacagcaaacacttttagggttgaaaacagctgttgtacagactacgcctccacatgatctggcagcaacccaaatccctcccgctccaccttccccttcaattcagggtcagagtgtgttgagttatagcccttctcgttcgcccagtaccagtcccaagttcaccaccagctgtatgactggttacagccctcagctgcaaggtctgtcctcaggtggcagtggttcttatagccctggagtgacctactcgcccgtcagtggttataataagttggcgagctttagcccctctcctccttctccgtaccctaccactgttggaccagtggagagcagtggattgagatctcgctaccgttcttcacctaccgtctacaactcacctactgacaaagaagactacatgaccgacctacgaactttggatacttttctcagaagtgaagaggagaaacagcatagggttaagctggggagcccagattctacctctccttccagcagtcctactttctggaactatagtcgttctatgggggattatgcacaaactttaaagaagtttcagtatcagcttgcctgtaggtctcaggccccatgtgctaacaaagatgaagccgatctcagctctaaacaagccgcagaagaggtctgggcaagagtggctatgaatagacaacttcttgatcatatggattcatggacagctaaatttagaaattggatcaatgagacaatattagtgccacttgttcaagagattgagtctgtcagcacacagatgagacgaatgggttgtccagagctacagataggagaggctagtattactagcttgaaacaagctgccctggttaaagcgcctctcattccgactttggacacaatcgttcagtatctagaccttactccaaatcaggaatacttgtttgaaaggatcaaagaactatctcagggaggttgtatgagctcatttcgatggaacagaggtggcgacttcaaaggacgaaagtgggatacagacctgcccaccgattctgctatcatcatgcatgtattttgcacctaccttgattccagattacctccacatccgaagtatcccgacggaaaaacttttacttctcagcactttgttcagacaccaaataaaccagatgttacaaatgagaatgttttttgcatttatcagagtgctatcaaccctccccattatgagctcatctaccagcgtcatgtatacaacctgccaaagggcagaaataatatgtttcatacattgttgatgtttctctacatcataaagaccaaagagtcaggaatgcttgggagagttaatcttggtctatctggtgtgaatatattgtggatctttggcgagtagcaagtcatatatttaattctgacatttagactatttcactgaaccagaagtcgaaactaaacatctctgagccactgactcttctgaaataaaatacacatgggtgtatgttacagactctttagatttaacagaaaatgtagctgttatgaaatgtaattgtaaaaatatgtcccgtatcttctatatcgagacattgcctttaattttatatcgcttttcagaaatttcagttgactacaaaactgcaacccttcggatttttattgactcaaaatagtgccattccccttaatgaaatagattttgagtctttttttcattgtaacccccaaatgagaatcatctacctgattcttgtaccaaaaaaaaatttttttcagtcttttttttttttagagagggtctctgtcaacgcagactggagtgcagtggcacgatcttagctcactacaacttctgcctcccaggctcaagcaattctcctgcctcagcctcctgagtagctgggattataggtgcgagccactgcgcccagcctcagttattttatttaacagtgtaagtacttagaaagtaagaaaattgctgatttagttttttttttttttttttttttaatgtttccccagcattctgcaagttaggccaaagcccacattcaaagaaatgagattaactcttaagtaatgtattaagtttatgtatattttaaaatattattaaaggaggtttgaaagtattgacatttaaaaagtcaacacttagattaaatttagctggtagttttaatttgggttttagttaagagtgtgaggacatcaggaaaactgtttactactttggttttagcagctcagttttactattccataatgtgttatttttaaagttctctttttaagatcacagtgatatcctatcttcaaattttttaaatatgttcaaaatatctggagggtgagaagttaccaagtttgtatgttttgtttgactcaccatctttattttctgtatatgtagtagctggcaattgcatatattttcttgattaacatattagagactgcttccatcatcttatgtaaacctggaaacagctgaaactagtcttttctgaagaaccgtgtatcagtgttagatgtgcatcccgttttgtcattccctcagactttgaatacagtcattactctctggaagagaaatgtaagtatattttttgttatctgcagtatggtttaacatgtattaataatacacatatgcagactcactaaagtatccccagtaattagtaaattccaaatttaagtcagtacagttctgtatttgtaaattctgtctttcaaaaagttgttcgtgtttttaaaagttgatgtccaaaggaaaggagcttcttttaagtacttttggtgtatgttgaatatttatttgctatgatattctagaagaaaatatcaaacatgttaaatataagaacatgttaaaatttaaatttgctatttcaaaagttactgaggatgtcttggaataacaattgtcatgctgttaaactagttgcatatacttcattaaaagcaccatggagaaacattttaacaatgc

SEQ ID NO: 799 - protein, 561 aa, Human
MMQGEAHPSASLIDRTIKMRKETEARKVVLAWGLLNVSMAGMIYTEMTGKLISSYYNVTYWPLWYIELALASLFSLNALFDFWRYFKYTVAPTSLVVSPGQQTLLGLKTAVVQTTPPHDLAATQIPPAPPSPSIQGQSVLSYSPSRSPSTSPKFTTSCMTGYSPQLQGLSSGGSGSYSPGVTYSPVSGYNKLASFSPSPPSPYPTTVGPVESSGLRSRYRSSPTVYNSPTDKEDYMTDLRTLDTFLRSEEEKQHRVKLGSPDSTSPSSSPTFWNYSRSMGDYAQTLKKFQYQLACRSQAPCANKDEADLSSKQAAEEVWARVAMNRQLLDHMDSWTAKFRNWINETILVPLVQEIESVSTQMRRMGCPELQIGEASITSLKQAALVKAPLIPTLDTIVQYLDLTPNQEYLFERIKELSQGGCMSSFRWNRGGDFKGRKWDTDLPTDSAIIMHVFCTYLDSRLPPHPKYPDGKTFTSQHFVQTPNKPDVTNENVFCIYQSAINPPHYELIYQRHVYNLPKGRNNMFHTLLMFLYIIKTKESGMLGRVNLGLSGVNILWIFGE

SEQ ID NO: 800 - DNA, 2935 bp, Human
agtgaggtgtctgggctcaggagtaaaagaaacaccttccttccctcacatccgtttgtggtttgtttaagaagaagaggaaaaaaaaaaaaaagaggggggaaaagcgctcaactctcccccaagccgcggcgcgcacccgtcggcgccgagcgcgcagcctgctccaccgccgcctcttggtcccgccgccgccgctgccgccgccgccgggcaggtaacttcatgcgctcattgtcccccccgcccgcccccccatccccgcctcccgcgcccctcgcagcccggcacacgcgctcgggctctaggtactgggcgttttattggagattctgagttgttctgcttgtagtttattttctccaccttggaggcccgggatgtggggggtgggggggtggggcggggatccagaagggacagggcgggaggggggcgagcgtcccgggccgggcggggtagggagcgtggccggacgcgggctcgtcaaggcccaatggctgctgttcggaaccagaggccggggaccggagaaaggaggagcggagaaggagaaggaggagagcacggcctggctgggacagaagcggtgggaccctgggaggcctccgctgtgcccgtgccgcgctcctcgggaccagcgcgtcgcacacaaaggggctgccgagccagagccaccagcggcctcagggcaccgtggggagcgcgcagctagggggcgctgtggcgcaccccgccccgcagccccgcccccggccctccccggccccaccccactcccaccgccctctccgcggccgtccccacccctatctccgcgacccccactcctcctcggctgttccccaaccctgtcactgtgctcccctccctactcccggcccgtagtggaggtgactttcctgcgcagcgccgcttctgagggcggagaacccacagggagtgcgacccctttgcacgctgtgagtgggcaactgtccgagggactcgagccgatcgaagggtgaggaccagctcgcctgggggtggacggcctggaaaagccgcccctctttggcttccctctgccgcctgcagcccgcacccctccgagattcgtgccccactggacggtttgcgaaggctgaggctgccttggggactcacaaaagaccacaggggtgattcgaagtgtaaatagggaaacaatcatcagcacacaatccggctaaagggataacatatgagtttgcttgttgtccttcatgggattcttctctttttatagctggacgccctatagggctcttggcagtccacgaaagacctggagtccgcctccccatttctccggtcggtgagtggcaggaggaaatcgccaaacatgttttcccgctttgcctccccaactcggaaacttgcaacttgccgtgtcctggaggttgagacaatttggggtctcttggctgccgtccaacagatttatctctgagggcagtgtccttggtgagaggtccaagtaggtgtgggcgacattttcctccatctcatgagggagcagccctgcacactagggcccaaaactctgcgaaggagcttggaagttcttcatccgttccacttgttttgctactccacacacccttctaggacatgttgattgccaactgctctgtgcagctttcccatagctgtctgttcccgtgcatttcggagcaccaagcaaatacgagcagagagacctggaaaaaaaaatgatgaagacagtattaatgataaaattaacatggctgagtgaattgtcaatgcaagttcctttactaactctttgttaagttttgctttgtactccttacatcctctttctcttaagccattgttttaatttcttctcgttatcatttttaaaagtaacagaaatacagctttcttcctaccttcacgattgacttggtggaggttgggttgcaaagaggaagcagtaagaaaaaataattattctatacattcacaagtccttcaaggcacaaaataaaagtaagaaatagaaaatatgtcctttctcctaataaaggtctttataataaaatttaaatgaagttttgtgtttcataacagcttcccaaatactgttgtagatactaaaatgtgcctgtatgtatttccttccacaataataatagtaataataaacttttttaggtccaaattaaacatttctcagcttaaatttctatcctcaatccaacatttattatatcaaaacttgatttttaaaaataaaactttcttggaattcatcattgatgtctgtttgatggcctcgtgaacatcaggaagatgaaatgaaatggttcaagactggaacaataccattatctgcatcttgactcctgggagataatgatatctcctgctttcctctacagacctaccagttttctctgctttaagggaaaatccaaatgcatgagacctgtgcattcttctacataatcaagagtctggtttcttccatcggagtgtatggagttaaagtggtatactgtacatggcatggtgtgataggtgggaatatgagctactgggggaaaaagttcttacttctagccacttatacaaagagaggccatctcagtgtaatctgaaaaaatgctcactttataatgctgtatccaaggcccatcaaaaactaaatggatgtatttgtactaaaagttggggaaagttgaatatctaaacctctgagcaaatctttcttaatttagaaaataaaatagagcatcattgtaatacttttcagtttcctggacattcaactccacatcatggataaataaaatagttatttgtccattcactcattcatttgtacattaatcaacagagagagtggtgaaaaacactaatgctttgtattatttataggtttaaaatacaaaacaaattacttaaa

SEQ ID NO: 801 - DNA, 2473 bp, Human
cccagccccgcgttcggctgctctcgaggaggccggagtccccggagacgatgcgccccgcgcagccgcctgcgcctgcgggagccggctgcccttgagatggagttgctgcctctttggctctgcctgggttttcacttcctgaccgtgggctggaggaacagaagcggaacagccacagcagcctcccaaggagtctgcaagttggtgggtggagccgctgactgccgagggcagagcctcgcttcggtgcccagcagcctcccgccccacgcccggatgctcaccctggatgccaaccctctcaagaccctgtggaatcactccctccagccttaccctctcctggagagcctcagcctgcacagctgccacctggagcgcatcagccgcggcgccttccaggagcaaggtcacctgcgcagcctggtcctgggggacaactgcctctcagagaactacgaagagacggcagccgccctccacgccctgccgggcctgcggaggctggacttgtcaggaaacgccctgacggaggacatggcagcgctcatgctccagaacctctcctcgctgcggtccgtgtccctggcggggaacaccatcatgcggctggacgactccgtcttcgagggcctggagcgtctccgggagctggatctgcagaggaactacatcttcgagatcgagggcggcgctttcgacggcctggctgagctgaggcacctcaacctggccttcaacaacctcccctgcatcgtggacttcgggctcacgcggctgcgggtcctcaacgtcagctacaacgtcctggagtggttcctcgcgaccgggggagaggctgccttcgagctggagacgctggacctgtctcacaaccagctgctgttcttcccgctgctgccccagtacagcaagttgcggaccctcctgctgcgcgacaacaacatgggcttctaccgggacctgtacaacacctcgtcgccgagggagatggtggcccagttcctcctcgtggacggcaacgtgaccaacatcaccaccgtcagcctctgggaagaattctcctccagcgacctcgcagatctccgcttcctggacatgagccagaaccagttccagtacctgccagacggcttcctgaggaaaatgccttccctctcccacctgaacctccaccagaattgcctgatgacgcttcacattcgggagcacgagccccccggagcgctcaccgagctggacctgagccacaaccagctgtcggagctgcacctggctccggggctggccagctgcctgggcagcctgcgcttgttcaacctgagctccaaccagctcctgggcgtcccccctggcctcttcgccaatgctaggaacatcactacacttgacatgagccacaatcagatctcactttgtcccctgccagctgcctcggaccgggtgggcccccctagctgtgtggatttcaggaatatggcatctttaaggagcctgtctctggagggctgtggcctgggggcattgccagactgcccattccaagggacctccctgacctacttagacctctcaagcaactggggggttctgaatgggagcctcgccccactccaggatgttgcccccatgttacaggtcctgtctctcaggaacatgggcctccactccagctttatggcgttggacttctctgggtttgggaatctcagggacttagatctgtcggggaattgcttgaccaccttcccaaggtttgggggcagcctggccctggagaccctggatctccgtagaaactcgctcacagcccttccccagaaggctgtgtctgagcagctctcgagaggtctgcggaccatctacctcagtcagaatccatatgactgctgtggggtggatggctggggggccctgcagcatgggcagacggtggccgactgggccatggtcacctgcaacctctcctccaagatcatccgcgtgacggagctgcccggaggtgtgcctcgggactgcaagtgggagcggctggacctgggcctgctctacctcgtgctcatcctccccagctgcctcaccctgctggtggcctgcactgtcatcgtcctcacttttaagaagcctctgcttcaggtcatcaagagccgctgccactggtcctccgtttactgacctggctgtgtgccaagactcgaaattcggtccgcacacaacaggacactttctctgccagctttcaagatgtgatgcagaggccaagtctgacgaattgaagtttcaattaaaatttaatatgtttccattcctcatcgcccaccccacccccgcccccaccaccgcccaagttctttttccatcattataattcatccttattatcttggtaaaatatttattaagtgactttttcagaaataaaaggcaacgtgtctcataaatattttttaaaaaaaaaaaaaaaaaaaaa

SEQ ID NO: 802 - protein, 692 aa, Human
MELLPLWLCLGFHFLTVGWRNRSGTATAASQGVCKLVGGAADCRGQSLASVPSSLPPHARMLTLDANPLKTLWNHSLQPYPLLESLSLHSCHLERISRGAFQEQGHLRSLVLGDNCLSENYEETAAALHALPGLRRLDLSGNALTEDMAALMLQNLSSLRSVSLAGNTIMRLDDSVFEGLERLRELDLQRNYIFEIEGGAFDGLAELRHLNLAFNNLPCIVDFGLTRLRVLNVSYNVLEWFLATGGEAAFELETLDLSHNQLLFFPLLPQYSKLRTLLLRDNNMGFYRDLYNTSSPREMVAQFLLVDGNVTNITTVSLWEEFSSSDLADLRFLDMSQNQFQYLPDGFLRKMPSLSHLNLHQNCLMTLHIREHEPPGALTELDLSHNQLSELHLAPGLASCLGSLRLFNLSSNQLLGVPPGLFANARNITTLDMSHNQISLCPLPAASDRVGPPSCVDFRNMASLRSLSLEGCGLGALPDCPFQGTSLTYLDLSSNWGVLNGSLAPLQDVAPMLQVLSLRNMGLHSSFMALDFSGFGNLRDLDLSGNCLTTFPRFGGSLALETLDLRRNSLTALPQKAVSEQLSRGLRTIYLSQNPYDCCGVDGWGALQHGQTVADWAMVTCNLSSKIIRVTELPGGVPRDCKWERLDLGLLYLVLILPSCLTLLVACTVIVLTFKKPLLQVIKSRCHWSSVY

SEQ ID NO: 803 - DNA, 2338 bp, Human
cgggtgtgctgagctagcactcagtgggggcggctactgctcatgtgattgtggagtagacagttggaagaagtacccagtccatttggagagttaaaactgtgcctaacagaggtgtcctctgacttttcttctgcaagctccatgttttcacatcttccctttgactgtgtcctgctgctgctgctgctactacttacaaggtcctcagaagtggaatacagagcggaggtcggtcagaatgcctatctgccctgcttctacaccccagccgccccagggaacctcgtgcccgtctgctggggcaaaggagcctgtcctgtgtttgaatgtggcaacgtggtgctcaggactgatgaaagggatgtgaattattggacatccagatactggctaaatggggatttccgcaaaggagatgtgtccctgaccatagagaatgtgactctagcagacagtgggatctactgctgccggatccaaatcccaggcataatgaatgatgaaaaatttaacctgaagttggtcatcaaaccagccaaggtcacccctgcaccgactcggcagagagacttcactgcagcctttccaaggatgcttaccaccaggggacatggcccagcagagacacagacactggggagcctccctgatataaatctaacacaaatatccacattggccaatgagttacgggactctagattggccaatgacttacgggactctggagcaaccatcagaataggcatctacatcggagcagggatctgtgctgggctggctctggctcttatcttcggcgctttaattttcaaatggtattctcatagcaaagagaagatacagaatttaagcctcatctctttggccaacctccctccctcaggattggcaaatgcagtagcagagggaattcgctcagaagaaaacatctataccattgaagagaacgtatatgaagtggaggagcccaatgagtattattgctatgtcagcagcaggcagcaaccctcacaacctttgggttgtcgctttgcaatgccatagatccaaccaccttatttttgagcttggtgttttgtctttttcagaaactatgagctgtgtcacctgactggttttggaggttctgtccactgctatggagcagagttttcccattttcagaagataatgactcacatgggaattgaactgggacctgcactgaacttaaacaggcatgtcattgcctctgtatttaagccaacagagttacccaacccagagactgttaatcatggatgttagagctcaaacgggcttttatatacactaggaattcttgacgtggggtctctggagctccaggaaattcgggcacatcatatgtccatgaaacttcagataaactagggaaaactgggtgctgaggtgaaagcataacttttttggcacagaaagtctaaaggggccactgattttcaaagagatctgtgatccctttttgttttttgtttttgagatggagtcttgctctgttgcccaggctggagtgcaatggcacaatctcggctcactgcaagctccgcctcctgggttcaagcgattctcctgcctcagcctcctgagtggctgggattacaggcatgcaccaccatgcccagctaatttgttgtatttttagtagagacagggtttcaccatgttggccagtgtggtctcaaactcctgacctcatgatttgcctgcctcggcctcccaaagcactgggattacaggcgtgagccaccacatccagccagtgatccttaaaagattaagagatgactggactaggtctaccttgatcttgaagattcccttggaatgttgagatttaggcttatttgagcactacctgcccaactgtcagtgccagtgcatagcccttcttttgtctcccttatgaagactgccctgcagggctgagatgtggcaggagctcccagggaaaaaggaagtgcatttgattggtgtgtattggccaagttttgcttgttgtgtgcttgaaagaaaatatctctgaccaacttctgtattcgtggaccaaactgaagctatatttttcacagaagaagaagcagtgacggggacacaaattctgttgcctggtggaaagaaggcaaaggccttcagcaatctatattaccagcgctggatcctttgacagagagtggtccctaaacttaaatttcaagacggtataggcttgatctgtcttgcttattgttgccccctgcgcctagcacaattctgacacacaattggaacttactaaaaatttttttttactgttaaaaaaaaaaaaaaaaaa

SEQ ID NO: 804 - DNA, 1158 bp, Human
atggcccgggagaacggcgagagcagctcctcctggaaaaagcaagctgaagacatcaagaagatcttcgagttcaaagagaccctcggaaccggggccttttccgaagtggttttagctgaagagaaggcaactggcaagctctttgctgtgaagtgtatccctaagaaggcgctgaagggcaaggaaagcagcatagagaatgagatagccgtcctgagaaagattaagcatgaaaatattgttgccctggaagacatttatgaaagcccaaatcacctgtacttggtcatgcagctggtgtccggtggagagctgtttgaccggatagtggagaaggggttttatacagagaaggatgccagcactctgatccgccaagtcttggacgccgtgtactatctccacagaatgggcatcgtccacagagacctcaagcccgaaaatctcttgtactacagtcaagatgaggagtccaaaataatgatcagtgactttggattgtcaaaaatggagggcaaaggagatgtgatgtccactgcctgtggaactccaggctatgtcgctcctgaagtcctcgcccagaaaccttacagcaaagccgttgactgctggtccatcggagtgattgcctacatcttgctctgcggctaccctcctttttatgatgaaaatgactccaagctctttgagcagatcctcaaggcggaatatgagtttgactctccctactgggatgacatctccgactctgcaaaagacttcattcggaacctgatggagaaggacccgaataaaagatacacgtgtgagcaggcagctcggcacccatggatcgctggtgacacagccctcaacaaaaacatccacgagtccgtcagcgcccagatccggaaaaactttgccaagagcaaatggagacaagcatttaatgccacggccgtcgtcagacatatgagaaaactacacctcggcagcagcctggacagttcaaatgcaagtgtttcgagcagcctcagtttggccagccaaaaagactgtctggcaccttccacgctctgtagtttcatttcttcttcgtcgggggtctcaggagttggagccgagcggagacccaggcccaccactgtgacggcagtgcactctggaagcaagtga

SEQ ID NO: 805 - protein, 385 aa, Human
MARENGESSSSWKKQAEDIKKIFEFKETLGTGAFSEVVLAEEKATGKLFAVKCIPKKALKGKESSIENEIAVLRKIKHENIVALEDIYESPNHLYLVMQLVSGGELFDRIVEKGFYTEKDASTLIRQVLDAVYYLHRMGIVHRDLKPENLLYYSQDEESKIMISDFGLSKMEGKGDVMSTACGTPGYVAPEVLAQKPYSKAVDCWSIGVIAYILLCGYPPFYDENDSKLFEQILKAEYEFDSPYWDDISDSAKDFIRNLMEKDPNKRYTCEQAARHPWIAGDTALNKNIHESVSAQIRKNFAKSKWRQAFNATAVVRHMRKLHLGSSLDSSNASVSSSLSLASQKDCLAPSTLCSFISSSSGVSGVGAERRPRPTTVTAVHSGSK

SEQ ID NO: 806 - DNA, 2341 bp, Human
gtcaggggcgtgttggccccgcacagattgagccgagttgtcgccccgctgggagaagtgaccctcctgcgcctgatcagaacactgaggctcagagaagttaactactccaaagtcatatagccagtattttctggagctgtaattcaaatcagatgtgttcaataccttctactaccccattgctgtctttatgaaaagaaatttcatttcaatataggtgactatgcagcctgcaattcaagtatggtttggagaagatctgcctctaagtcctcggagtcctctgactcccagacacggaccaggattggctaatgtttgtcagtacgatgagtggatagctgtgaggcatgaagccactttgttgcccatgcaagaagatctgtcaatctggttatctggtttattaggtattaaagttaaggcagaaaaattattggaagaacttgataatggagtactattatgtcaactgattgatgttcttcaaaacatggtgaaaacatgcaactctgaagaatcagggaattttccaatgagaaaagtgccctgtaagaaagatgctgcatcaggttcattctttgctcgggacaataccgcaaacttccttcactggtgtagggacattggggttgatgaaacttacctctttgaatctgaaggtttagttttgcacaaagatccaagacaggtgtatctttgtcttcttgaaattggtcgaattgtgtcaagatacggggttgagccaccagtgttagtaaaacttgagaaagaaattgagttagaagagactttgcttaatacttctgggcctgaagattccatcagcattccaaaatcatgctgtcggcatgaagagctacatgaagctgttaaacatattgctgaggaccctccttgtagttgttctcatcgattttctattgagtatttatctgaaggacggtaccgactaggggataaaatactctttataagaatgcttcatggaaaacatgtcatggttcgcgttggtggaggctgggatactcttcaaggatttttgcttaaatatgacccctgtcgaatattacagtttgccacactagaacaaaaaattttagcatttcaaaaaggagtttctaatgaaagtgtacctgattcgcctgccagaacacctcagcctcctgaaatgaatcctttgtcagcagttaacatgtttcagaaacaaaattcaaaacccagcgtgccagttagtattccaaaaagcaaagaaaaacagggacgtccaccaggtgcattggtgccagcatcttcactgaaaggaggtaatctgggctctatgtcagtccgttctaaattgccaaattctccagcagcatcttctcatcccaagctcaagtcttcaaaaggcataacgaagaaaccgcaggctccttcaaacaatgcatcatcttcacttgcttcattaaatccagtaggtaaaaacacttcttcaccagctttaccaagaactgcaccttgtatatctgagtcaccgagaaaatgtatttcatcccccaatacccccaaggccaaggttattccagcccagaattcagcagatctgcccgagtccacacttttgccaaataagtgttcaggaaaaactcaacctaagtatttgaaacataatcatatttcttccagagataatgcagtatctcacttagctgcacattcaaattcatcctcaaaatgtcccaagctgcctaaagcaaatatacctgtaagacctaaaccttctttccagtcctctgcaaaaatgacaaaaaccagttccaaaaccatagccacgggtctaggaacacagtctcaaccatccgatggagccccacaagcaaagccagtcccagcacagaaacttaaatcggccttgaatttaaatcagccagtttctgtgtcctcagtttctcctgtaaaagccacacagaaatcaaaagataagaatatagtttcagctaccaaaaagcagcctcagaataaaagtgcatttcagaagacaggacccagctccttgaagtctcctggccgtaccccactgtccatcgtgagcctaccccagtcttctaccaaaacacaaactgcaccgaagtcagcacagactgtcgctaagagccagcattcaactaaagggcctcccagaagtggcaaaaccccagcttcaatcaggaaaccaccctcatctgttaaggatgcagatagtggagataaaaaacctactgcaaagaaaaaggaagatgatgaccattattttgtcatgactggaagtaagaaacctagaaaataaatacatactcattataaaaaaaaaaaaaaa

SEQ ID NO: 807 - DNA, 397 bp, Human
  unsure 70: unknown base
  unsure 71: unknown base
  unsure 73: unknown base
  unsure 74: unknown base
  unsure 75: unknown base
  unsure 76: unknown base
  unsure 206: unknown base
gattagcctagcatttgtcctctttatataaaggacttcttatagcctgattcctaatgcagagttcagnnannnngacatttatttggtaacagcttttgagaaatgttactttatttctaaataattatatacttggcagtttattcttccagttaagtttactaatagttactgatttgttaatataagtttgtaagttgttnttgaaagttaaaatgaagctgggtgtggtggctcacacctgtaatcccagcgctttgggaggccaaggcgggcagatcaaggagtcaggagatggagaccagcctggccaacatagggaaaccctatctctactaaaaacacaaaaattagctgggtgtgatggcgtgcacctgtaagctgagctactcag

SEQ ID NO: 808 - DNA, 2955 bp, Human
gtttctctgcacacaacttaatccctggcaatgaaaaatgaacctctcccccacccttgctgccgcctctcgcctcacgcccccagagaagagtttctccaccaggcagcaggtgaaggtttttttccaagtcacatgattcaggattcagggggagaatccttcttggaacagagatgggcccagaactgaatcagatgaagagagataaggtgtgatgtggggaagactatataaagaatggacccagggctgcagcaagcactcaacggaatggcccctcctggagacacagccatgcatgtgccggcgggctccgtggccagccacctggggaccacgagccgcagctatttctatttgaccacagccactctggctctgtgccttgtcttcacggtggccactattatggtgttggtcgttcagaggacggactccattcccaactcacctgacaacgtccccctcaaaggaggaaattgctcagaagacctcttatgtatcctgaaaagggctccattcaagaagtcatgggcctacctccaagtggcaaagcatctaaacaaaaccaagttgtcttggaacaaagatggcattctccatggagtcagatatcaggatgggaatctggtgatccaattccctggtttgtacttcatcatttgccaactgcagtttcttgtacaatgcccaaataattctgtcgatctgaagttggagcttctcatcaacaagcatatcaaaaaacaggccctggtgacagtgtgtgagtctggaatgcaaacgaaacacgtataccagaatctctctcaattcttgctggattacctgcaggtcaacaccaccatatcagtcaatgtggatacattccagtacatagatacaagcacctttcctcttgagaatgtgttgtccatcttcttatacagtaattcagactgaacagtttctcttggccttcaggaagaaagcgcctctctaccatacagtatttcatccctccaaacacttgggcaaaaagaaaactttagaccaagacaaactacacagggtattaaatagtatacttctccttctgtctcttggaaagatacagctccagggttaaaaagagagtttttagtgaagtatctttcagatagcaggcagggaagcaatgtagtgtggtgggcagagccccacacagaatcagaagggatgaatggatgtcccagcccaacctctaattcactgtatggtcttgatctatttcttctgttttgagagcctccagttaaaatggggctccagtaccagagcagctagcaactctgccctaatgggaaatgaaggggagctgggtgtgagtgtttacactgtgcccttcacgggatacttcttttatctgcagatggcctaatacttagttgtccaagtcgcgatcaaggactctctcacacaggaaacttccctatactggcagatacacttgtgactgaaccatgcccagtttatgcctgtctgactgtcactctggcactaggaggctgatcttgtactccatatgaccccacccctaggaacccccagggaaaaccaggctgggacagccccctgttcctgagatggaaagcacaaatttaatacaccaccacaatggaaaacaagttcaaagacttttacttacagatcctggacagaaagggcataatgagtctgaagggcagtcctccttctctaggttacatgaggcaggaataagaagtcagacagagacagcaagacagttaacaatgtaggtaaagaaatagggtgtggtcactctcaattcactggcaaatgcctgaatggtctgtctgaaggaagcaacagagaagtggggaatccagtctgctaggcaggaaagatgcctctaagttcttgtctctggccagaggtgtggtatagaaccagaaacccatatcaagggtgactaagcccggcttctggtatgagaaattaaacttgtatacaaaatggttgccaaggcaacataaaattataagaattcactataccttcccctccctggaactcaggatccaagtctagaaaatgaaaggactgggtttgaattgcttcaaaacctcttccatctcagaagaccagaccctgggaactgagattccagacacaattttggaagctctccaaccaaaataaggcccccctaccccagtatataattgaagacactagtaacacctgactgcatctcatctcagcagagccagaatatggggacaaggttcaggggtgcccctgctgaatggtgtgaacagcaggatctcaagatgtaattggaaagaactacccacactgaccatccagaaatctaagagaccattctggggggtttggggaaaccatctgaccgaggcctgacttctattccagttagattgacaataattgagcagcaggcatttttcatttctggtcaggaaagcattgtgcctttagcaaacaatcagtgtgcaacagtgatgtggtcatctagccagggaatggctgctccatcccctgcataatatattcctgcttcaaacacctctcagaaaaccagttccgcgagggtttttatatccccacaaagttgttgagagacaatgatgaccctggaagtggggaggaggacttctgagaaacagcaacctctctcctgattggggtagccatgagatttctctagctatatccaacttggcatctgtacatcatctttggaggaacatcttatttgtggaaggaccttgacaagccgtttgagatggaatgtaggccctgatgttatgcttcagtaaaaaaagatggaagcttccctgctataccaaaacatggagcaaaatttgcatttttctcaagaaggagagaaaaggagtaggactccagcaaagtttgtcagaaggaaagctagaaaagatttaaaaaaaa

SEQ ID NO: 809 - protein, 234 aa, Human
MDPGLQQALNGMAPPGDTAMHVPAGSVASHLGTTSRSYFYLTTATLALCLVFTVATIMVLVVQRTDSIPNSPDNVPLKGGNCSEDLLCILKRAPFKKSWAYLQVAKHLNKTKLSWNKDGILHGVRYQDGNLVIQFPGLYFIICQLQFLVQCPNNSVDLKLELLINKHIKKQALVTVCESGMQTKHVYQNLSQFLLDYLQVNTTISVNVDTFQYIDTSTFPLENVLSIFLYSNSD

SEQ ID NO: 810 - DNA, 2067 bp, Human
gttcattccaagcggaagtgatggctggtggatatgacttgaggggaattcctgagggcaaggaaaaggaagaaaggggccccagagaagacgaggcacagctggagaaccctagggctgtgaacactgcgactgccgcgcggggcagctgcgccgtgtttgctggaagcctccggtagctgctgaaaccttcgctccggaggtcgcctcggtaaaccttgcggatgattccaccacggcggaaagacgaaaaggaggcttctaggcacccgggaccgcccgtgtcccgcccttttccccgatgaagtctgacgcggcaggtccctcggcagggttaatgggacggcctggtggggcattgccggtctttcccagccacagacaagcttcgcgcctcgatcccccagcgcccccagacgctggatgccgaggcctggtcctttacagccgccgacgcctcatgagcgaagccagccagatgccagcaccgccttcggccccgccccgagccagcccctcccacatccccgcccggggcacgccctcggcccgcccccatctccgccccgagcacgcccctagattggccccgccccgtccccgcccgcaactccgccccgaccggaagaagccgcggcacccagcgcttatagggccgggaatgggggtgccgccgctgcctagtcagttctgcgtccgctgaggctcggtcaccgcctcgctgtcgtcgcggcgcccccgccccgtcctctgtccgtaccgcccccggagccagggccgagtcctcgccatgccggcccggcggctgctgctgctgctgacgctgctgctgcccggcctcggggtgagtgaccggggagcgtggggtggaggacagctcgcgacggccgggtcggggccggggcagcgtcgcggcgccggggctggagtccgagctgggagcgcgacggcggcggccagatgccccgtgagcccagccgtgggaggctcgggccgggcgtaggaggcggcaccgggccgggagagcttccctgacgggagtcgcggccccaccgaggcgtcggccgcccgaagagcctcccaagccagcgcggctgtcacgggcagcggctccccggaccccgcgggctcgggcgcaacttcgtggcgtcctgcacggcacttgggggtcccagaaggccccggcctgaggaggccgcccacctgcgggaccctcctcctcgcgggcgggcgccggcgctgcctggcgggggccgcggaggagccgaaagggcgttgggatccaggggaagggtctgtcctgcgcttcgaatccttgtttgaactttttaaaaattcgaaaactttggggaacgaatgcaacagggagtaaggactctcacccgagagctggcttctgccacttgccctgccggtttcttggtactgggaggctgcaggcttccttctgtgcaccgagacttccttgagcaagtggagctgtgggaattgcactcttggaagatcccgcatgggttcgaggtgaggccgcttcagaacctcaaatgaaagactgtctcctcgtgggagagcacctggggccatcagaaatgtcttttcatctttttctggaggagacgaatgatagggcctggtttacattcatttaactctttatgaccttcactcagctgtggatttgggggcactttgtgggagacttggcttttttttttcttctggttggaagaacctaaattagtgaatgtttttcacaaaatgtattgttcaggatgtgagcgtggcaaatttgtccgtgttctgtttaatgacctctttaaaggtactgtgtactctttaatagggatatcatgtaccaggtgtcccagtagagcactgacatgtgtgtgcctgagtgccagccaccgtgtgaactctttggaggttttgcattttaggtaaataactgtctgtactcttggagtaacaagaatttggaaacaggagaagtaaataaataaggttgcctttttcaaattcagggttttttttttaaataaaggaaaatttgtagactctttataatag

SEQ ID NO: 811 - protein, 133 aa, Human
MKSDAAGPSAGLMGRPGGALPVFPSHRQASRLDPPAPPDAGCRGLVLYSRRRLMSEASQMPAPPSAPPRASPSHIPARGTPSARPHLRPEHAPRLAPPRPRPQLRPDRKKPRHPALIGPGMGVPPLPSQFCVR

SEQ ID NO: 812 - DNA, 2195 bp, Human
ggagggaggtaccctgctgaggggaaggggggatccctgacacctgggcttccccgggagtcggctgtggagtcgagttgagctccctttccgggtctggggaactcaacctcaccttatgcctggggtctccggggaactagtgggctttctgcaacggggggaaggaggggacgactcccgcccctagtttacccctcaaaagttaatgcctttgtcggaggaagcaatttcagtccactctccttttcagtccctgttggccgcttaaactaaaaggctacagacgggcttaaatgcgtctccgctgtgtttcttatgcctcgggccggcagggtaacgggttctagtcacagcttgtagagttcaggatgggtgacattcaggtcctattgtttttgagtcaaggtttcggctatagcttcttgaattatgaagctgtcataataaagaattcctgattatctaaagctgttattcttccctacttccaaggcagaatttgaatatattttggtggatgaaacgaaaacaaggagagtcttgtgactatgagatactagctggttgatgtatcatgaaaaacttagtggtccctatgtgggaaggtaaatggaaaactgcaaaaagagcaagaatgaattacaaagtgaaattagaagaaatatctggcttacttgtggatgctttgtacaccaatacaatatattatttgataaaagtcgactatagagaggtgtggttaattcgattattttataatttttcttttttagagaaaaaccaagatttcactttcaagatggaaagtccgtcagactcagctgtggttttacctagcactcctcaggcctctgcgaatccatcatctccctatacaaatagttcccgaaaacaacctatgagtgcaacacttagagaaagattaaggaaaacaagattttcatttaattcctcttacaatgtggtgaaacgtcttaaagtagagagtgaagaaaatgatcagaccttttcagagaaaccagcatcttccacagaggaaaactgtttggaatttcaagaaagttttaaacatatagacagtgaatttgaagaaaatacaaatttgaaaaatactttgaagaatctcaatgtctgtgaatctcagtcacttgattctggatcatgcagtgctctccaaaatgagtttgtgagtgagaagcttcctaaacaaagattaaacgctgaaaaagccaaattggtgaagcaggttcaggagaaagaagaccttcttcggaggctaaaactagtcaaaatgtatagatcaaagaatgatctgtctcagttacagttgttaataaagaagtggagaagctgtagccagctcttgctttatgagttgcagtcagctgtgtctgaagagaacaagaaactaagccttactcaattgatagaccactatgggttagatgataaattactacactataacagaagtgaagaagaatttatagatgtttaattcctgatttttgctccagaatatctttgagaatgacaacttaattaaaagatacttaggcactttttttttttttttgagactgagtttcgctcttgtcatcctggctggagtgtgatggtgcgatcttgactcactgcaacctctgcctctcgggttccagcaattctcctgcctcagcctcccgagtagctgagattacaggcgcccgccaccatgcccggctaatttttgcatttttagtagagactgggtttcaccacgttggccaggctggtctcgaactcctgacctcaggtgatccaccgcctaggcctcccaaaaccattagggctcagaggaaggtatcccaatgaatatcaattaagggcactttaatatataaattataaactaagttctaaaaggaaaattagtattttggatagatttgtcaaaacgacatttaagtcatgtttaaaaagtcatttgggcagttctggaaactagttttaatacatttgttttttatgacaaaaagttttattttaaatgttaaaaattgtccaatctggtgaatgtctaaccctaaagtttaaaaatttctgcctcctaagtttatgtaccttgtttccatccatttaccacatatttccatctgatagtctagcaggtaattaaacttatatgtccaaaaccaaaaaaaaaaaaaaaa

SEQ ID NO: 813 - DNA, 14878 bp, Human
  unsure 8376: unknown base
  unsure 8377: unknown base
  unsure 8378: unknown base
  unsure 8379: unknown base
  unsure 8380: unknown base
  unsure 8381: unknown base
  unsure 8382: unknown base
  unsure 8383: unknown base
  unsure 8384: unknown base
  unsure 8385: unknown base
  unsure 8386: unknown base
  unsure 8387: unknown base
  unsure 8388: unknown base
  unsure 8389: unknown base
  unsure 8390: unknown base
  unsure 8391: unknown base
  unsure 8392: unknown base
  unsure 8393: unknown base
  unsure 8394: unknown base
  unsure 8395: unknown base
  unsure 8396: unknown base
  unsure 8397: unknown base
  unsure 8398: unknown base
  unsure 8399: unknown base
  unsure 8400: unknown base
  unsure 8401: unknown base
  unsure 8402: unknown base
  unsure 8403: unknown base
  unsure 8404: unknown base
  unsure 8405: unknown base
  unsure 8406: unknown base
  unsure 8407: unknown base
  unsure 8408: unknown base
  unsure 8409: unknown base
  unsure 8410: unknown base
  unsure 8411: unknown base
  unsure 8412: unknown base
  unsure 8413: unknown base
  unsure 8414: unknown base
  unsure 8415: unknown base
  unsure 8416: unknown base
  unsure 8417: unknown base
  unsure 8418: unknown base
  unsure 8419: unknown base
  unsure 8420: unknown base
  unsure 8421: unknown base
  unsure 8422: unknown base
  unsure 8423: unknown base
  unsure 8424: unknown base
  unsure 8425: unknown base
  unsure 8426: unknown base
  unsure 8427: unknown base
  unsure 8428: unknown base
  unsure 8429: unknown base
  unsure 8430: unknown base
  unsure 8431: unknown base
  unsure 8432: unknown base
  unsure 8433: unknown base
  unsure 8434: unknown base
  unsure 8435: unknown base
  unsure 8436: unknown base
  unsure 8437: unknown base
  unsure 8438: unknown base
  unsure 8439: unknown base
  unsure 8440: unknown base
  unsure 8441: unknown base
  unsure 8442: unknown base
  unsure 8443: unknown base
  unsure 8444: unknown base
  unsure 8445: unknown base
  unsure 8446: unknown base
  unsure 8447: unknown base
  unsure 8448: unknown base
  unsure 8449: unknown base
  unsure 8450: unknown base
  unsure 8451: unknown base
  unsure 8452: unknown base
  unsure 8453: unknown base
  unsure 8454: unknown base
  unsure 8455: unknown base
  unsure 8456: unknown base
  unsure 8457: unknown base
  unsure 8458: unknown base
  unsure 8459: unknown base
  unsure 8460: unknown base
  unsure 8461: unknown base
  unsure 8462: unknown base
  unsure 8463: unknown base
  unsure 8464: unknown base
  unsure 8465: unknown base
  unsure 8466: unknown base
  unsure 8467: unknown base
  unsure 8468: unknown base
  unsure 8469: unknown base
  unsure 8470: unknown base
  unsure 8471: unknown base
  unsure 8472: unknown base
  unsure 8473: unknown base
  unsure 8474: unknown base
  unsure 8475: unknown base
  unsure 8476: unknown base
  unsure 8477: unknown base
  unsure 8478: unknown base
  unsure 8479: unknown base
  unsure 8480: unknown base
  unsure 8481: unknown base
  unsure 8482: unknown base
  unsure 8483: unknown base
  unsure 8484: unknown base
  unsure 8485: unknown base
  unsure 8486: unknown base
  unsure 8487: unknown base
  unsure 8488: unknown base
  unsure 8489: unknown base
  unsure 8490: unknown base
  unsure 8491: unknown base
  unsure 8492: unknown base
  unsure 8493: unknown base
  unsure 8494: unknown base
  unsure 8495: unknown base
  unsure 8496: unknown base
  unsure 8497: unknown base
  unsure 8498: unknown base
  unsure 8499: unknown base
  unsure 8500: unknown base
  unsure 8501: unknown base
  unsure 8502: unknown base
  unsure 8503: unknown base
  unsure 8504: unknown base
  unsure 8505: unknown base
  unsure 8506: unknown base
  unsure 8507: unknown base
  unsure 8508: unknown base
  unsure 8509: unknown base
  unsure 8510: unknown base
  unsure 8511: unknown base
  unsure 8512: unknown base
  unsure 8513: unknown base
  unsure 8514: unknown base
  unsure 8515: unknown base
  unsure 8516: unknown base
  unsure 8517: unknown base
  unsure 8518: unknown base
  unsure 8519: unknown base
  unsure 8520: unknown base
  unsure 8521: unknown base
  unsure 8522: unknown base
  unsure 8523: unknown base
  unsure 8524: unknown base
  unsure 8525: unknown base
  unsure 8526: unknown base
  unsure 8527: unknown base
  unsure 8528: unknown base
  unsure 8529: unknown base
  unsure 8530: unknown base
  unsure 8531: unknown base
  unsure 8532: unknown base
  unsure 8533: unknown base
  unsure 8534: unknown base
  unsure 8535: unknown base
  unsure 8536: unknown base
  unsure 8537: unknown base
  unsure 8538: unknown base
  unsure 8539: unknown base
  unsure 8540: unknown base
  unsure 8541: unknown base
  unsure 8542: unknown base
  unsure 8543: unknown base
  unsure 8544: unknown base
  unsure 8545: unknown base
  unsure 8546: unknown base
  unsure 8547: unknown base
  unsure 8548: unknown base
  unsure 8549: unknown base
  unsure 8550: unknown base
  unsure 8551: unknown base
  unsure 8552: unknown base
  unsure 8553: unknown base
  unsure 8554: unknown base
  unsure 8555: unknown base
  unsure 8556: unknown base
  unsure 8557: unknown base
  unsure 8558: unknown base
  unsure 8559: unknown base
  unsure 8560: unknown base
  unsure 8561: unknown base
  unsure 8562: unknown base
  unsure 8563: unknown base
  unsure 8564: unknown base
  unsure 8565: unknown base
  unsure 8566: unknown base
  unsure 8567: unknown base
  unsure 8568: unknown base
  unsure 8569: unknown base
  unsure 8570: unknown base
  unsure 8571: unknown base
  unsure 8572: unknown base
  unsure 8573: unknown base
  unsure 8574: unknown base
  unsure 8575: unknown base
  unsure 8576: unknown base
  unsure 8577: unknown base
  unsure 8578: unknown base
  unsure 8579: unknown base
  unsure 8580: unknown base
  unsure 8581: unknown base
  unsure 8582: unknown base
  unsure 8583: unknown base
  unsure 8584: unknown base
  unsure 8585: unknown base
  unsure 8586: unknown base
  unsure 8587: unknown base
  unsure 8588: unknown base
  unsure 8589: unknown base
  unsure 8590: unknown base
  unsure 8591: unknown base
  unsure 8592: unknown base
  unsure 8593: unknown base
  unsure 8594: unknown base
  unsure 8595: unknown base
  unsure 8596: unknown base
  unsure 8597: unknown base
  unsure 8598: unknown base
  unsure 8599: unknown base
  unsure 8600: unknown base
  unsure 8601: unknown base
  unsure 8602: unknown base
  unsure 8603: unknown base
  unsure 8604: unknown base
  unsure 8605: unknown base
  unsure 8606: unknown base
  unsure 8607: unknown base
  unsure 8608: unknown base
  unsure 8609: unknown base
  unsure 8610: unknown base
  unsure 8611: unknown base
  unsure 8612: unknown base
  unsure 8613: unknown base
  unsure 8614: unknown base
  unsure 8615: unknown base
  unsure 8616: unknown base
  unsure 8617: unknown base
  unsure 8618: unknown base
  unsure 8619: unknown base
  unsure 8620: unknown base
  unsure 8621: unknown base
  unsure 8622: unknown base
  unsure 8623: unknown base
  unsure 8624: unknown base
  unsure 8625: unknown base
  unsure 8626: unknown base
  unsure 8627: unknown base
  unsure 8628: unknown base
  unsure 8629: unknown base
  unsure 8630: unknown base
  unsure 8631: unknown base
  unsure 8632: unknown base
  unsure 8633: unknown base
  unsure 8634: unknown base
  unsure 8635: unknown base
  unsure 8636: unknown base
  unsure 8637: unknown base
  unsure 8638: unknown base
  unsure 8639: unknown base
  unsure 8640: unknown base
  unsure 8641: unknown base
  unsure 8642: unknown base
  unsure 8643: unknown base
  unsure 8644: unknown base
  unsure 8645: unknown base
  unsure 8646: unknown base
  unsure 8647: unknown base
  unsure 8648: unknown base
  unsure 8649: unknown base
  unsure 8650: unknown base
  unsure 8651: unknown base
  unsure 8652: unknown base
  unsure 8653: unknown base
  unsure 8654: unknown base
  unsure 8655: unknown base
  unsure 8656: unknown base
  unsure 8657: unknown base
  unsure 8658: unknown base
  unsure 8659: unknown base
  unsure 8660: unknown base
  unsure 8661: unknown base
  unsure 8662: unknown base
  unsure 8663: unknown base
  unsure 8664: unknown base
  unsure 8665: unknown base
  unsure 8666: unknown base
  unsure 8667: unknown base
  unsure 8668: unknown base
  unsure 8669: unknown base
  unsure 8670: unknown base
  unsure 8671: unknown base
  unsure 8672: unknown base
  unsure 8673: unknown base
  unsure 8674: unknown base
  unsure 8675: unknown base
  unsure 8676: unknown base
  unsure 8677: unknown base
  unsure 8678: unknown base
  unsure 8679: unknown base
  unsure 8680: unknown base
  unsure 8681: unknown base
  unsure 8682: unknown base
  unsure 8683: unknown base
  unsure 8684: unknown base
  unsure 8685: unknown base
  unsure 8686: unknown base
  unsure 8687: unknown base
  unsure 8688: unknown base
  unsure 8689: unknown base
  unsure 8690: unknown base
  unsure 8691: unknown base
  unsure 8692: unknown base
  unsure 8693: unknown base
  unsure 8694: unknown base
  unsure 8695: unknown base
  unsure 8696: unknown base
  unsure 8697: unknown base
  unsure 8698: unknown base
  unsure 9848: unknown base
  unsure 9849: unknown base
  unsure 9850: unknown base
  unsure 9851: unknown base
  unsure 9852: unknown base
  unsure 9853: unknown base
  unsure 9854: unknown base
  unsure 9855: unknown base
  unsure 9856: unknown base
  unsure 9857: unknown base
  unsure 9858: unknown base
  unsure 9859: unknown base
  unsure 9860: unknown base
  unsure 9861: unknown base
  unsure 9862: unknown base
  unsure 9863: unknown base
  unsure 9864: unknown base
  unsure 9865: unknown base
  unsure 9866: unknown base
  unsure 9867: unknown base
  unsure 9868: unknown base
  unsure 9869: unknown base
  unsure 9870: unknown base
  unsure 13056: unknown base
  unsure 13057: unknown base
  unsure 13058: unknown base
  unsure 13059: unknown base
  unsure 13060: unknown base
  unsure 13061: unknown base
  unsure 13062: unknown base
  unsure 13063: unknown base
  unsure 13064: unknown base
  unsure 13065: unknown base
  unsure 13066: unknown base
  unsure 13067: unknown base
  unsure 13068: unknown base
  unsure 13069: unknown base
  unsure 13070: unknown base
  unsure 13071: unknown base
  unsure 13072: unknown base
  unsure 13073: unknown base
  unsure 13074: unknown base
  unsure 13075: unknown base
  unsure 13076: unknown base
  unsure 13077: unknown base
  unsure 13078: unknown base
  unsure 13079: unknown base
  unsure 13080: unknown base
  unsure 13081: unknown base
aaatatttgatatttttattggaaatgtttttgttagtttgaggggaagggtatgaagacagatctcaaggtaaagtcagagagggctgtcatcagtatgctggggagtttagggacaggaggcattggtaggggattagatgtagcagcagtcaggctgggatcaagatgcctgggggacatcttgatcttggcctttcagggcaagtgggaggctagaaaggtggctaggaaagaacagcattcttcaggtaagggtatagacttgggatgtgaggcgttatgctgaaaggttctgtcacgaggggatcagaggacagtggggaaattgggtgggttatctagcctgtactgtctgcaggtcctgaaatttgatgctgtcatagtctttgcagtgggtcggttggaatgattctgggggcagaagctcagagccccttagtaggaatggaggcggcccttctgctgccactgctcagccccctccactgcatgacgaagggtggaggaaattcccagcaacatatggcccaggccttgcagcagtgtggaggtccaacgaaggagctccctgaatggcagagacaagaggaaatcagatgatttggaaaacttgggaggaagccatcaagctgggagatgaggactttccacaagcaagagctaactaggggtaggtgggtgcaagaggacgaattatggggactatccaactgtaggggatggggcagtatgacatgttgatttctgacctgagtactttctttgggccaagtccttgaaagtcacaactcatagagtagagcccgtagaatgtggctttgacattcaggctgccaaagaggtctcgagggttttgcttgtacacgtcaaaggtgaatcgggcgatgtccttgctgtgcttgggcctctcccgtcccaggccatatgacagcactccactctgtaggacacccttgtcagtgcagtagatcctcataccagacacccaccactaatctccatcagcactgggtcagaccctccctcgcttggactttctgtccactgtgtgacatccttgacaattccacaactcctcctgcacctggtccccaggatcagggttaagctagagaggaagcccgggaaagctctaaaggacaggcattggaagcagccccagtataggcctcttacccttgtagggctccagctctgaccagactgcaacaccatcaggcacgtgtcatcctccagcagctggaagaagtcctcactgtccactgcagttccatcctcctctagcaccagggttagcactccattcagcagtagggtctccaatgcctgcccaatggcaagaagcaagaagggcaggtcttatcccatgccccttccctctttagctgcccaacatccatcagttggctctagacattggtcgatgtcccactttgactttccggcactttgatacctcctaaaggttgcagctctccgtgttcttcagtttttgggggatcctagctagaggctgacctttttcctctttgctcctaccatgtcattggcatctccccttgctcccctccaagtcacttctggtttggaattggaaagcaagccaggttctcacgaagtccacccttctgtcttatctacaatgctgcacctcacttcccacaccctcaagagttctccagaagtgttttcagtaatagtgtttaacctttttgagtccttactctgtgccaggtatgaggactttacctacattatcctcttactcctttcaacaaccctaggaggtgatgtattattattgcctttttatagttgaagaaactgaggttttggtaggttgaacaacttcccaaggtttgacaggcaggaagtggcagaatcagaatttgaacttgatttgtcacacaaatcacctttccatactagcttctgaattccgtccctcgaactctccctatctcctgctaacccctgctcccatagaaaagctcactaggtggaaaatgaacaaattgaccagagctcattaggcccactccgctgcttttagccctcagagggaggggcagctgtgtgacttcagccctctgctccatcatcacaagttgccactgttgtggagccccttggctacccctgctataggaaccgaggaacttggcctacttactttggctagcagctcctggcgggtggcagctgtcaggcctttccggatggtccgcttgtgatcacagacacggaaaggtcgctggggtggtggagctgaggtccagaccctccgtccaaactccgagcttatattagatactgacctggtagttgagaagaaaagtcaagaaggggcgaggaggggcttggtgagtgtaaagggcatgatgagggtagagtggctagagggctagggagggagagatctaggtttatcgattagggatgagggagagaccatggagtgcaggtgggggcgggtggctcaggagcttgacaagcccactgtggagtggggagcaggagaggaaggggtactggttagtctcctaggggctgagtggagtattgttgccctgcctatatcccctaaaggtggagggtagagcggagggttagcagtcacctgagtaagtcactggggttcagagctgagaggtactccatggtggaccggagagttccttccctggaacttctgggctgggtggttctctcctgtgctggggctttagtggtgttttctgttacaaacctgggatctcagcccaggacaaggtgggaatgagtcaagcctggactctggcccccctgcctggccagtaagaagggcaaagtccaaggggagggatgagggaggggccagatggggtcctggaggaagaattgcctggcaaaagccattggagcttgtatgtgtgtctttggtgatgacatgtgttgtgagggtagatgggaaccatgtaaaaggatgaaatgtgacttctggtgtttttttatttctatggagggactttctggggacggtttctggctctcaggctctgagaagctgcagtttatgagtggctctgtgtgtgctgccacctactggagaagccataagctgcagctttaggaaaagggaacccggggcagagtgtggggaagtgggatggcagcatggcagggctttggaaaatgagaggtgagagtgtgtccaggaagggtgtaaggagaggatggatcctgatacatggattcaggatcattagggtcctgtctgggacactggccttcctgcttacctgctctttccttcctccttggtcggaggaggggctggctcactgctctggcttcattttccagagctgcctgctgcagtcacacttaggtcatcttctctcacttttctccttttgccgattagtggacgtgacagagatgtgaatggggcagggatgtcctttgatggcatcaagactttagcttctggtgcgctgtgtcccagctctgatttcagttgcagccgtgatggacagttgcatggaagctgagactctcactgacagtgaaaccctcaaatgaacacaatccctgctttcctgccaaggatccttgtagggtcccccagcttccccactttttttctgtgtcctgacaaagaaacacagagtaacttgattgccctgtgacctggccagttgcatttcccctgcaggcttgagcccaagccagagccttgaaaaggtattcaggttgttgcccaaaacactgaaaaaaactggccctggccctgaaccaaataccttgaaccctcgtaaactccataccctgacccccttgttttggatatacccaggtagaacaactctctctcactgtctgttgtgaggatacgctgtagcccactcattaagtacattctcctaataaatgctttggactgatcaccctgccagtcttttgtcttgggcaatctatacttttctcagaggttcccaaggcctactgaagggacttaacatactcttaatggctttcctctctcttgttttaccttatgccctcacttcctgagttaacctcccaaatacaggatcacctgtacccaagcccttagctcaagaatacaggatcacctgtacccaagcccttagctcaagctctgctttggaagaacccaaactaagacagtgctcctggtgccctccccaagcaacctcaagttctggctgttacttgagcagaggcctttcttttcccttcccccagctctatccatctgccaggcccccctcaaatctcttcatttccaagttttgcttgacttttccaagaggagagggctgcttcttagtatgtccctactcatcctttcctttcttgtcttgtatcctggtgcagcctggtaatggggcctcttcatggttgtgtgtcatgactccctaaccattatgcctccatgcatcccctgttcctcctggaacctagcaccatgccttacatggaaaagctgtcattgacagcccggtgagagccctgagggtggagtgactggggcagggcctgaggcaagaggtgggaggaggtaggaggccaggggctcagccggaccaggagactggaaacaggcaaggataaggcaggtgggggactgagttgtttgggtcacctctgcaggccagagagaccaggcaacatacacactgcagaaggtgggctgggaggatggggccagagctgggggagggatgagaacagaagcaggaccaggattcagcagagtcctcctatttccttccaccaccagggaatcttactgccccacttcagcttgtgctgtttcctggcaaggcaggctctcacatgcctggacgcctgggtgcgttggtgatgggaaggagcagggtgagggaggggccccaggagaggcccaggatgagcctcatcttgtccctccccattcttgtcttaccctctgcaaatgtgataggcacaggacaggagtaggcacctcgcctactgctgcttaacctttcagcttctccaggcccccaatcctgcttgctcccagcttggtaagtagatctgtgcacgtccctttacaccccaccatccagttttgcccagatgtgctagaatggggctggacaaagaaggaggggccagactagaggagtggtggtagagatagtgacagcctggggtgatgactttatgcctgtttaccactgagctctgggaaggaggccaggagtggggcaggtcaactgactgggagcaggggatctgggttccaagaaggagttgtgtttgaggtggggtctgggtcctcgtggaagtcaggactcccaggcagaaaagaggcaggctgcagggaagtaaggaggaggcatggcaccttctcatcgggcatcacaggtggggttttgccccacccctgaacgccctctgtggcgccttccacccacctgtaggcccagaaggatgtcggtctgctaccgtcccccagggaacgagacactgctgagctggaagacttcgcgggccacaggcacagccttcctgctgctggcggcgctgctggggctgcctggcaacggcttcgtggtgtggagcttggcgggctggcggcctgcacgggggcgaccgctggcggccacgcttgtgctgcacctggcgctggccgacggcgcggtgctgctgctcacgccgctctttgtggccttcctgacccggcaggcctggccgctgggccaggcgggctgcaaggcggtgtactacgtgtgcgcgctcagcatgtacgccagcgtgctgctcaccggcctgctcagcctgcagcgctgcctcgcagtcacccgccccttcctggcgcctcggctgcgcagcccggccctggcccgccgcctgctgctggcggtctggctggccgccctgttgctcgccgtcccggccgccgtctaccgccacctgtggagggaccgcgtatgccagctgtgccacccgtcgccggtccacgccgccgcccacctgagcctggagactctgaccgctttcgtgcttcctttcgggctgatgctcggctgctacagcgtgacgctggcacggctgcggggcgcccgctggggctccgggcggcacggggcgcgggtgggccggctggtgagcgccatcgtgcttgccttcggcttgctctgggccccctaccacgcagtcaaccttctgcaggcggtcgcagcgctggctccaccggaaggggccttggcgaagctgggcggagccggccaggcggcgcgagcgggaactacggccttggccttcttcagttctagcgtcaacccggtgctctacgtcttcaccgctggagatctgctgccccgggcaggtccccgtttcctcacgcggctcttcgaaggctctggggaggcccgagggggcggccgctctagggaagggaccatggagctccgaactacccctcagctgaaagtggtggggcagggccgcggcaatggagacccggggggtgggatggagaaggacggtccggaatgggacctttgacagcagaccctacaacctgctgcccttccctgtccctttccaccccccacccaccctccagaggtcagtgttctgggacatttggggacccttctttgactagagtttggatctggctgggtaggattactatacacttggggcaggcccaggctcctccaaactgagggattatgagggtggtgatggtccctgttaaggactattgtgtgcttgcaagttggcatgtacccatgtgccagcattgctcacttgttgccaatagctgttattgtgaaatacactgggaagccattagatgatgacttaagtgtgcttcccctggtggttcttcatgcctgagttgtactgaagccacctagttccctgctgggtcaagccaggctgggcagtgccagccttcagtggcatcttgacctgccctcctcagcccaggtgccctggttccacaggccaacccatagaaccactctggaaataaaggagaaaatggaaggagaggtatgggagcttggatgaggggtaggaatgggatccattctctgaggcttataaaagcctctgaggaggaaatggctctgaaggggaaaacgaatctgtggggtttgaaaaggaagttttcctggctgtcttgtatttggtccagtgagtatgagacaggcacacaaggagtggacagtggtgtaggggccctgggagtctgagacttaccttgccccctgaccatctgatcctccctgcaaaggccacctgacgtgaaaaggagccaggagcaagcactcagtcagggaagtttggaggttggccattggggtatgaggaatggcaggaatatttagaggacaggaataatttttcagagaagtgccacatattctttttctctttgccaagtctgggctccttctaagatgctgctagctattcctagcccgttccccaatacttctctgcccccaccttttggaatccttatctaggtctaaaaacggttctagatcctgacccctttgattgggggatgtagaatgggattcttttcaggggacatccacaagtacacatctgtggtcactaaggtgaccagctcatcccagttggcctggaactttcccagtttaagcactgaaaactccttgtcccagccctgccggtttcccaacgaactgagatggttggccgctcaagtggctaccctgaccatcaccccaggctctactttagcgactgctcacacctccctgcttcccagacagaagtcaaaacagcaaaagaaacccagtccccagggtcatgctagggctaccaaaactgggatgaactagcacctgtgaactagaacagcagggagtatgcttagagtgcctggtcctgggtgtggggaagaaaggccatcaaggtagatgcgggtggggaacagcttgagagaggaggcaaggacaacccagtttctgtctgaaggggcctctggttgaccctggagtttctgtccccaaacacaggcctcacgggattctttctgtcctcatgcactgggcagaggttccttaacttcctttgttgcacattgccattctctcacatcccgtgcggtcaggaagcccttcctgaactctgacttcagttcttgctgcggtttctgcccatttttttcatatcctctgacagctgcgaggtcatctctgctctggcttttctccaagcagaacaagtgggggctctggaaaggttaagggacctcagtggccaccattatactttgcatctttcctgagaagtgagagttgaaagggaagcaggaaggcccatggtcagattgaaggaaggacnnnnnnnnnnnnnnnnnnnnnnnnnnnnnnnnnnnnnnnnnnnnnnnnnnnnnnnnnnnnnnnnnnnnnnnnnnnnnnnnnnnnnnnnnnnnnnnnnnnnnnnnnnnnnnnnnnnnnnnnnnnnnnnnnnnnnnnnnnnnnnnnnnnnnnnnnnnnnnnnnnnnnnnnnnnnnnnnnnnnnnnnnnnnnnnnnnnnnnnnnnnnnnnnnnnnnnnnnnnnnnnnnnnnnnnnnnnnnnnnnnnnnnnnnnnnnnnnnnnnnnnnnnnnnnnnnnnnnnnnnnnnnnnnnnnnnnnnnnnnnnnnnnnnnnnnnnnnnnnnnnntagcttttgcaggagacttcaaggaaaggagacattcctctgtccaggaaacgggtaaggggaccatttctgcattgctggtttcccctcttggcagggtgggcatgaggcatcactgttcctgctccctcactcctgctcctcatgctcagcctgccagctcggcctcaactttgtgtgtctaaagtgggaactgaataggtaggctgtgagaagataggaaagaggtagtgccaatctccttgcccagatcataaaaaaatttcccccaaagactcaagcagggtaaccacatgggcaagcacaaggtaggtgcttggcgaaaggggaagtaattggcattctgtgtgataccaaggagaccatttggattttggcttctaccaaagagaatggagaattggttgacctaaatggaaccagtccctttaagtaaggggaggaaagggggtgctggaagatggccctcttcccaccacctagatcatagcttgaactgaagccaaggacagagtgctgcccccttcggcatttactgatgtgccctctttaaatcatgatgttatctaacccaaacccagacccaggacctagtcacagctccaacctacacttcctattaatcttaaaacaaagcaaaacaaaacaaaaagatatcagcattgtagcctccaatctgagcccatttcccttctctggctaccatacctccttctcctatatgataccattcactactttgttcaattatccagtctagacctgcatctgaggccacacccagccttctcactccccacacccctctttcctctctcactgctccttcctggtctcttctcatctggccccacctctaaggagtcctcctgccttctgggttgccctggaaaacagactatcccccctcctagtgaagggagtgggtaggggtttcagccccaccctcaggaagatgcgtcttccctgtcctctgctctgtggtacttcctctctggctgatttagcaaacagcacctagacctggggccaggcctttggcagtgggacagatccagggataggctacaccaccctgccctgaccctgggattggcatcagcttccaaccagttcctgccaaagcttgtaagtaagtttcctgggagcnnnnnnnnnnnnnnnnnnnnnnngacagtgtgcagccatgaaagaaggtgcaaaggaatctccaaagaaagcctgaccagcgtaaaaagttgggaggctttgtccttgtcacttgtccactaaactcctcccctccctgttattcctggttgaccctgggcatctctggggacagtaggcaggtgattgggaaagttaatgggattgaggggctgagggcctggcagggggcaaaaagactggcctttcaaggggtgcagcattggtaggaactctgtttggttctgggctttagggtctcctaaggggaggagactgaaaaggtctggaaatgctgctgctgctgtggtcactgtatattttgcaattgggtctgtggacaggaaggggccgcatgacccagttaggaaactagtctttgtactcaaccagatccctttaagttgtcagtctgcagcgatgggggcagtatatttcagggggacctctgatgctgctgaccctggagatagactagagttctcagcctaggtgtgtccatggcgtcaggaaacccttggtcctctactctcatgcgtgtgtccgccctcactctccaggtcctcccgacggccatgaacactacatcttctgcagcacccccctcactaggtgtagagttcatctctctgctggctatcatcctgctgtcagtggcgctggctgtggggcttcccggcaacagctttgtggtgtggagtatcctgaaaaggatgcagaagcgctctgtcactgccctgatggtgctgaacctggccctggccgacctggccgtattgctcactgctccctttttccttcacttcctggcccaaggcacctggagttttggactggctggttgccgcctgtgtcactatgtctgcggagtcagcatgtacgccagcgtcctgcttatcacggccatgagtctagaccgctcactggcggtggcccgcccctttgtgtcccagaagctacgcaccaaggcgatggcccggcgggtgctggcaggcatctgggtgttgtcctttctgctggccacacccgtcctcgcgtaccgcacagtagtgccctggaaaacgaacatgagcctgtgcttcccgcggtaccccagcgaagggcaccgggccttccatctaatcttcgaggctgtcacgggcttcctgctgcccttcctggctgtggtggccagctactcggacatagggcgtcggctacaggcccggcgcttccgccgcagccgccgcaccggccgcctggtggtgctcatcatcctgaccttcgccgccttctggctgccctaccacgtggtgaacctggctgaggcgggccgcgcgctggccggccaggccgccgggttagggctcgtggggaagcggctgagcctggcccgcaacgtgctcatcgcactcgccttcctgagcagcagcgtgaaccccgtgctgtacgcgtgcgccggcggcggcctgctgcgctcggcgggcgtgggcttcgtcgccaagctgctggagggcacgggctccgaggcgtccagcacgcgccgcgggggcagcctgggccagaccgctaggagcggccccgccgctctggagcccggcccttccgagagcctcactgcctccagccctctcaagttaaacgaactgaactaggcctggtggaaggaggcgcactttcctcctggcagaatgctagctctgagccagttcagtacctggaggaggagcaggggcgtggagggcgtggagggcgtgggagcgtgggaggcgggagtggagtggaagaagagggagaggtggagcaaagtgagggccgagtgagagcgtgctccagcctggctcccacaggcagctttaaccattaaaactgaagtctgaaatttggtcaaccttgtgagtggggtacatgtgctgtgggtatcggggtgctcgtgggcgccctggtggggcccctctcggtagttgagagtcacgtcctttagttccccatgatttacaattttggaagggacacaaagaaacatagactgcccccatcccagatgattccgagtacatagtctgcagataatacttagcaaaacgcagtctacagactcctaaagcagcttgtctaggaagaccacccatgtgggcttatcactccaggttctgtgacccgggaccttctgagaaaacagcactgctgtgaaatatcttccttgaagcctgtgataagtctccttgttagaatgactccaacttcctgccaataatctttgtcctctccataggagatgttctaggggatgccttccttccctccatttcacaaagaggccagacttgaggactaagtcattagatcttatcccttagaattttgcatatcagcatctgctaacctccacaacacaccctggcacagggtggggctgagggccccaggaaacaaagattcccaaaagtgagagggatgagtcattatttcctagagatgactgttgttttagagaaccttggtccaactctgttctgacaaggttttaggaagatggcaacaacagtggcagcagtgtactttttggatctttctcataaaaaaacaaaagagcaagtaagagagggaaaccaaatatccacatgcaacatccgcaacaaatctagtatgtcaaggtttgacatactcccatggaccccaaagtatgagccagtgagaatgagtcatcaatacctcaagacccatataccagcatctgtgcagaaggatgcagaaggaagcaaagggatgttggatggacctaagaagaggagatccccaagctgtctacagatccttactggaaggtatggtgcaccaatttgagaacagcagctgaaactgggagggacctaacggagtatttcccagtcctctcgcccattctgtatggtgagcacataataggtacttatttagtgtttgtcgaattaataaagttcaaatgacatttccctggagattcttccggtatttttgagtagggggcaggaaagggcaaatttttgttttgagtcatgtggctaaattctttatgcttccaaggtgtacaaaatactataatcaagttggcagagaggctgagggagttctcttcctgagcttgtgaaaaaaatcactccctttcaaaatgcttagtctcacatgcatgcatgtgtgcaggcatgtgnnnnnnnnnnnnnnnnnnnnnnnnnnctaaaattggcctgggaagaagaagaattcccactgaagggcaatgagaaggtgatccccagctatatcagcagcttcagacatcaatgggctccagacaccccagagtctctttattgaggttcttagaaggcgagtgcaatctcagcctagggtagctgaaggaggtccagttcgtgtcaagtctgtgttcaggaagtaggtgcagagctgccctttgcctttcaccttgatgacaccccggctgtagcaggtgtagcccagggactgtagggcccatgctgtctcctcagtcacctacaattggaggggggcgagggaatatggaggtggccctattcttagtccccctccccctatgcctccaatgtggttccctcacttggattttgccaaggactcctgtactctccatgcggctggccacgttcactgtgttgccccaaatgtcatattgcggcttctgggccccaataactccagctactacgggtccatggttcaaccctaatgagggatgtggtaatgacagacttggagaaggaagaggggaagaggaagccacaaggaactggaaggaagggagaagagcctggggggccctagaggagaggaggggtctctaagggctggaggaatgtagcttaagaaaaagagtgggagagcctcgtacctccttgcccagcaccttcacaccccatcccagggagtgagtcaggaaaggggcttcaggatgaactgggagcagctaacaaaggacttggagtggggcaagctcaggaaggtgaggaggtaccagactgctgcagcaggggaagtctctcacccactcgcaggcggaagttgttgaatgaatgcttgttgatgacgtccagcttagaccccagggccacggcaaattccaccatagtgccaaggtggctgcagctccgttcagcatcctggcaatgggcccgcccaccagggtgggccagtgagggcacaggaataagtcccactaataagcccatcaatgagagcccagaggaggatggtaggtaaggaagggttgccgtacctgttgtgcatcctgtccagaggtggcatttaagcctgtggctgccatgtaggtgctgccgatggtcttgatcttctccaccccactgaacttgggcttggagagcagctgtatatagagaagagtcctgtccccagtctctcttactctctccatcacctctcccagaagcccagccccaagcctttggagttaaaggatcaggctgtgggagtggagatagtgtcaggaaggagagggttggtggtgggcagtgttgctggagtgggtagatctgggggatcagaggaggtgagggagtactgtggaggggaggattgacttcatggccagaaaagcaaagtggaaggaggtactggtggaaaattctagaatctaggacatagggtctgggagactcttggaattttcacctcatcaaaatcagcaattatctcattgagcagcctcagacactctaggccctcatgattgatgttggattcagagtagaactccttgaagtctgggactgaggcgaagaggacacaaacgcattcataggactggtggtagagatcctgggggaacaggagactggagtgaggggtgtgtgtcatgttcctctcccttctagaggtctgcgtggggccctcctccccatgtccacactcctggtctccctgtttaagaagaattgggaaggagggagaggagtagggccaggctaccccagggaagtgacttaggagtcaaagctt

SEQ ID NO: 814 - protein, 352 aa, Human
MNTTSSAAPPSLGVEFISLLAIILLSVALAVGLPGNSFVVWSILKRMQKRSVTALMVLNLALADLAVLLTAPFFLHFLAQGTWSFGLAGCRLCHYVCGVSMYASVLLITAMSLDRSLAVARPFVSQKLRTKAMARRVLAGIWVLSFLLATPVLAYRTVVPWKTNMSLCFPRYPSEGHRAFHLIFEAVTGFLLPFLAVVASYSDIGRRLQARRFRRSRRTGRLVVLIILTFAAFWLPYHVVNLAEAGRALAGQAAGLGLVGKRLSLARNVLIALAFLSSSVNPVLYACAGGGLLRSAGVGFVAKLLEGTGSEASSTRRGGSLGQTARSGPAALEPGPSESLTASSPLKLNELN

SEQ ID NO: 815 - DNA, 1184 bp, Human
cggacggaatgtttttgaagtgtgtgtttgcctaaggtgtgtgtagaaaggtagctacttttcagtctctgcctgcctttaatccattacaatgtcctaattaaaaacatttaaaaagctacattggaaaatgatccctgaggctagaatgctgttggcacagtgaaaaagacgcaatcaataagtaaacaggcaatgtcagcccggagagctttcagaacaacatgcctactcgggggaaaaaaaattacaagtcgctttagcctatttaaatattttccaagatctttgttaaatttcaggtaataatatttcttcctttgaacaagcgttgtatgtttgcctttgactgagaatggcctaggctagagaccatttggtattcaacttgtgactattttagtatggggctggaccccaaaaattcatgctcaatgaaatgattttcacttactgagatgaatttactttttgcttccttcagcaattcatcaatctaatggaagaaagagtagctatcatcataatgagaatagacttctacgagtatgagtcaatgtcaatactttatttaataatgcaaattctattactatatatttggtctcaatccaaatttgctttaaattgagtttccttgccattgcacactcctatctttctgaacacacaccaccccacacacacaccatacacacttgtttcattgcgcttcattttattgcacttctcgaagaatgtgttttttacaaattgaagatttgtggcaacttttcatcgagtgagtctattggcatcatttttgcaagagcatatgctcacttcctgcctctgtgactagcattttttagcaataacatatttttaatgaaggtatgtacattgttttttagacataatgctattgcacacttgactaaaatgtagcctaagtataatttttatatgccatgggaaactaaaaaaagtgacttactttattgtaatatttgctttattactttggtctggaactgcctcacactatctctgaagtatgcatgtatagcttttcataacacagatatcacatttgaccagatcctattgttactgaacaatgttgatgctaacattgatgatatcaatcactattactggaatcattatcaacatatcaataaatatttttagaacattttgaa

SEQ ID NO: 816 - DNA, 964 bp, Human
taaataaataaaatttacaaaattttaaaaatcaaatgaaatatgtcaggtttgtacctaccacatttaaactagggacttgaagaattaaacattttattacaaatgaagcacttcatgcacagactggcacatagtaagtagtcgataggtgttaacaatttgtgttattgttattttctggagtccaactaacaaatcccacagtgaatgacatcacagggatgcaaccaacaagatccagaatatggaaacttctactagataaacaactccatttcttcagcaacaattcaagagagagagagaagagaagctatacattttaaaaggctgaagaaatatatgaaccaaatttgtatgaggcaatcagaaaaactgacaccgactgtattaaggaattatctaattttagtgtggtaatgagattgctgttatgttttctaaaaagtcattatactttagattttcataataaaataattatgaatgaagtatggtatctgaaagtatcttcagaataacccagtgtgcatgtatgattaattgggtgggtttacaaaattgcccatgaattgatcattgttaaagcttggctgttaaaacatggcactcttctctctaatactgttgaagttttctgtaatacaaagtttttcaaaaaatgcattccaggaaagtcccataaacataggcagagaaacattctgtttgaagttatgttagtttttaggcttttctcatttttatcacagttaggaaatcctaagtatccaaatcctgcctaaggctataggaacctctcaaaaatgcaactctaaagaatgtgtatgcaagaactaataatagcaaaggaaagcaaagtactttttcctttattattggctgtactaagcccccagacttgtttatatattccttaattcatcaaaactgcaaaaatggtctttgagtaccattatag

SEQ ID NO: 817 - protein, 7 aa, Human
MVFEYHY

SEQ ID NO: 818 - DNA, 213 bp, Human
gcatatcatacctgtcaagctacctagcaccacgaatagaactaatattaatggatggactaatacaaggatctaatatatgacagtgatagtcttaaaaacaccgatttgttattttccttatatataatccaaattcctttctatccttctggcaatgtttctactgcctgactaccttaaataactatatagtgtcaatttcttgcttgg

SEQ ID NO: 819 - DNA, 769 bp, Human
ccatcttagcaggagatccctttgaactagaatgccctgtgaaatactgtgctaacaggcctcatgtgacttggtgcaagctcaatggaacaacatgtgtaaaacttgaagatagacaaacaagttggaaggaagagaagaacatttcatttttcattctacattttgaaccagtgcttcctaatgacaatgggtcataccgctgttctgcaaattttcagtctaatctcattgaaagccactcaacaactctttatgtgacaggaaagcaaaatgaactctctgacacagcaggaagggaaattaacctggttgatgctcaccttaagagtgagcaaacagaagcaagcaccaggcaaaattcccaagtactgctatcagaaactggaatttatgataatgaccctgacctttgtttcaggatgcaggaagggtctgaagtttattctaatccatgcctggaagaaaacaaaccaggcattgtttatgcttccctgaaccattctgtcattggactgaactcaagactggcaagaaatgtaaaagaagcaccaacagaatatgcatccatatgtgtgaggagttaagtctgtttctgactccaacagggaccactgaatgatcagcatgttgacatcattgtctgggctcaacaggatgtcaaataatatttctcaatttgagaatttttactttagaaatgttcatgttagtgcttgggtcttaagggtccataggataaatgattaaaatttctctcagaaactta

SEQ ID NO: 820 - protein, 194 aa, Human
ILAGDPFELECPVKYCANRPHVTWCKLNGTTCVKLEDRQTSWKEEKNISFFILHFEPVLPNDNGSYRCSANFQSNLIESHSTTLYVTGKQNELSDTAGREINLVDAHLKSEQTEASTRQNSQVLLSETGIYDNDPDLCFRMQEGSEVYSNPCLEENKPGIVYASLNHSVIGLNSRLARNVKEAPTEYASICVRS

SEQ ID NO: 821 - DNA, 513 bp, Human
  unsure 39: unknown base
tagataagcatgatgtttaggtcctatttttcaattttntaactgttttattgcaacaatatttgtatttaagtctccattttaatgccttgtggtgtttttttatgcatgtcactaagttgtcatcccacataaattgatgtgcagcatagggtattaaatctacataatgattttaaaacagaaatagttgatggtaaaatgtaaatgttttgcaaaaattccttataaaaagttttgtagtaacatttcacttgtaaattttttttgtaaaaaaaaaaaaaaaatgaaaaaaaaagatgaatccagaaaaaaacctgtttcccatattctagaatttagacaattattctgccagcaaagcctctggggctgtaattgacatttttacagtgctgatttgtataaaatttgttttttgtggatttggaaataaaatcatgtacaagttgttgcctgcaataacaattgcaagtaacctattaaaaattcccttgagtttaacatgtttca

SEQ ID NO: 822 - DNA, 513 bp, Human
  unsure 26: unknown base
  unsure 55: unknown base
  unsure 83: unknown base
  unsure 88: unknown base
  unsure 98: unknown base
  unsure 106: unknown base
  unsure 108: unknown base
  unsure 109: unknown base
agctatatattattccggggcagccnaaagaggggatgttgctttcaagcgaaancaccaaatcacattcttttctggtaaantagantactaatganttgctttngnnagaaatttccagagcattactgaatgttcaagtgcttcttagagcacaagttgaacctttcttatctctgcactcagtttctcgtaaaactgaagtcacagtgacctcttccccatttcgtagaaaagaaacccaaggaagagagtggttaagaaacagaagatacggttctcatcacatttgcctgagaactacgtatagtcatccattcagtgcctcgttaagtaaataaatgattgaatcatttgtatacatgacctcatggaaaaaagcacggtaaaatgaatgtttgagggtgggtagacagaattattcaacccggacaggtgttagatgttcactctatccccccctttttttttgcattaggttttattcattatttgcatcatctatggacctaa

SEQ ID NO: 823 - DNA, 3145 bp, Human
  unsure 1518: unknown base
  unsure 1519: unknown base
  unsure 1520: unknown base
  unsure 1521: unknown base
  unsure 1522: unknown base
  unsure 1523: unknown base
  unsure 1524: unknown base
  unsure 1525: unknown base
  unsure 1526: unknown base
  unsure 1527: unknown base
  unsure 1528: unknown base
  unsure 1529: unknown base
  unsure 1530: unknown base
  unsure 1531: unknown base
  unsure 1532: unknown base
  unsure 1533: unknown base
  unsure 1534: unknown base
  unsure 1535: unknown base
  unsure 1536: unknown base
  unsure 1537: unknown base
  unsure 1538: unknown base
  unsure 1539: unknown base
  unsure 1540: unknown base
  unsure 1541: unknown base
  unsure 1542: unknown base
  unsure 1543: unknown base
  unsure 1544: unknown base
  unsure 1545: unknown base
  unsure 1546: unknown base
  unsure 1547: unknown base
  unsure 1548: unknown base
  unsure 1549: unknown base
  unsure 1550: unknown base
  unsure 1551: unknown base
  unsure 1552: unknown base
  unsure 1553: unknown base
  unsure 1554: unknown base
  unsure 1555: unknown base
  unsure 1556: unknown base
  unsure 1557: unknown base
  unsure 1558: unknown base
  unsure 1559: unknown base
  unsure 1560: unknown base
  unsure 1561: unknown base
  unsure 1562: unknown base
  unsure 1563: unknown base
  unsure 1564: unknown base
  unsure 1565: unknown base
  unsure 1566: unknown base
  unsure 1567: unknown base
  unsure 1568: unknown base
  unsure 1569: unknown base
  unsure 1570: unknown base
  unsure 1571: unknown base
  unsure 1572: unknown base
  unsure 1573: unknown base
  unsure 1574: unknown base
  unsure 1575: unknown base
  unsure 1576: unknown base
  unsure 1577: unknown base
  unsure 1578: unknown base
  unsure 1579: unknown base
  unsure 1580: unknown base
  unsure 1581: unknown base
  unsure 1582: unknown base
  unsure 1583: unknown base
  unsure 1584: unknown base
  unsure 1585: unknown base
  unsure 1586: unknown base
  unsure 1587: unknown base
  unsure 1588: unknown base
  unsure 1589: unknown base
  unsure 1590: unknown base
  unsure 1591: unknown base
  unsure 1592: unknown base
  unsure 1593: unknown base
  unsure 1594: unknown base
  unsure 1595: unknown base
  unsure 1596: unknown base
  unsure 1597: unknown base
  unsure 1598: unknown base
  unsure 1599: unknown base
  unsure 1600: unknown base
  unsure 1601: unknown base
  unsure 1602: unknown base
  unsure 1603: unknown base
  unsure 1604: unknown base
  unsure 1605: unknown base
  unsure 1606: unknown base
  unsure 1607: unknown base
  unsure 1608: unknown base
  unsure 1609: unknown base
  unsure 1610: unknown base
  unsure 1611: unknown base
  unsure 1612: unknown base
  unsure 1613: unknown base
  unsure 1614: unknown base
  unsure 1615: unknown base
  unsure 1616: unknown base
  unsure 1617: unknown base
  unsure 1618: unknown base
  unsure 1619: unknown base
  unsure 1620: unknown base
  unsure 1621: unknown base
  unsure 1622: unknown base
  unsure 1623: unknown base
  unsure 1624: unknown base
  unsure 1625: unknown base
  unsure 1626: unknown base
  unsure 1627: unknown base
  unsure 1628: unknown base
  unsure 1629: unknown base
  unsure 1630: unknown base
  unsure 1631: unknown base
  unsure 1632: unknown base
  unsure 1633: unknown base
  unsure 1634: unknown base
  unsure 1635: unknown base
  unsure 1636: unknown base
  unsure 1637: unknown base
  unsure 1638: unknown base
  unsure 1639: unknown base
  unsure 1640: unknown base
  unsure 1641: unknown base
  unsure 1642: unknown base
  unsure 1643: unknown base
  unsure 1644: unknown base
  unsure 1645: unknown base
  unsure 1646: unknown base
  unsure 1647: unknown base
  unsure 1648: unknown base
  unsure 1649: unknown base
  unsure 1650: unknown base
  unsure 1651: unknown base
  unsure 1652: unknown base
  unsure 1653: unknown base
  unsure 1654: unknown base
  unsure 1655: unknown base
  unsure 1656: unknown base
  unsure 1657: unknown base
  unsure 1658: unknown base
  unsure 1659: unknown base
  unsure 1660: unknown base
  unsure 1661: unknown base
  unsure 1662: unknown base
  unsure 1663: unknown base
  unsure 1664: unknown base
  unsure 1665: unknown base
  unsure 1666: unknown base
  unsure 1667: unknown base
  unsure 1668: unknown base
  unsure 1669: unknown base
  unsure 1670: unknown base
  unsure 1671: unknown base
  unsure 1672: unknown base
  unsure 1673: unknown base
  unsure 1674: unknown base
  unsure 1675: unknown base
  unsure 1676: unknown base
  unsure 1677: unknown base
  unsure 1678: unknown base
  unsure 1679: unknown base
  unsure 1680: unknown base
  unsure 1681: unknown base
  unsure 1682: unknown base
  unsure 1683: unknown base
  unsure 1684: unknown base
  unsure 1685: unknown base
  unsure 1686: unknown base
  unsure 1687: unknown base
  unsure 1688: unknown base
  unsure 1689: unknown base
  unsure 1690: unknown base
  unsure 1691: unknown base
  unsure 1692: unknown base
  unsure 1693: unknown base
  unsure 1694: unknown base
  unsure 1695: unknown base
  unsure 1696: unknown base
  unsure 1697: unknown base
  unsure 1698: unknown base
  unsure 1699: unknown base
  unsure 1700: unknown base
  unsure 1701: unknown base
  unsure 1702: unknown base
  unsure 1703: unknown base
  unsure 1704: unknown base
  unsure 1705: unknown base
  unsure 1706: unknown base
  unsure 1707: unknown base
  unsure 1708: unknown base
  unsure 1709: unknown base
  unsure 1710: unknown base
  unsure 1711: unknown base
  unsure 1712: unknown base
  unsure 1713: unknown base
  unsure 1714: unknown base
  unsure 1715: unknown base
  unsure 1716: unknown base
  unsure 1717: unknown base
  unsure 1718: unknown base
  unsure 1719: unknown base
  unsure 1720: unknown base
  unsure 1721: unknown base
  unsure 1722: unknown base
  unsure 1723: unknown base
  unsure 1724: unknown base
  unsure 1725: unknown base
  unsure 1726: unknown base
  unsure 1727: unknown base
  unsure 1728: unknown base
  unsure 1729: unknown base
  unsure 1730: unknown base
  unsure 1731: unknown base
  unsure 1732: unknown base
  unsure 1733: unknown base
  unsure 1734: unknown base
  unsure 1735: unknown base
  unsure 1736: unknown base
  unsure 1737: unknown base
  unsure 1738: unknown base
  unsure 1739: unknown base
  unsure 1740: unknown base
  unsure 1741: unknown base
  unsure 1742: unknown base
  unsure 1743: unknown base
  unsure 1744: unknown base
  unsure 1745: unknown base
  unsure 1746: unknown base
  unsure 1747: unknown base
  unsure 1748: unknown base
  unsure 1749: unknown base
  unsure 1750: unknown base
  unsure 1751: unknown base
  unsure 1752: unknown base
  unsure 1753: unknown base
  unsure 1754: unknown base
  unsure 1755: unknown base
  unsure 1756: unknown base
  unsure 1757: unknown base
  unsure 1758: unknown base
  unsure 1759: unknown base
  unsure 1760: unknown base
  unsure 1761: unknown base
  unsure 1762: unknown base
  unsure 1763: unknown base
  unsure 1764: unknown base
  unsure 1765: unknown base
  unsure 1766: unknown base
  unsure 1767: unknown base
  unsure 1768: unknown base
  unsure 1769: unknown base
  unsure 1770: unknown base
  unsure 1771: unknown base
  unsure 1772: unknown base
  unsure 1773: unknown base
  unsure 1774: unknown base
  unsure 1775: unknown base
  unsure 1776: unknown base
  unsure 1777: unknown base
  unsure 1778: unknown base
  unsure 1779: unknown base
  unsure 1780: unknown base
  unsure 1781: unknown base
  unsure 1782: unknown base
  unsure 1783: unknown base
  unsure 1784: unknown base
  unsure 1785: unknown base
  unsure 1786: unknown base
  unsure 1787: unknown base
  unsure 1788: unknown base
  unsure 1789: unknown base
  unsure 1790: unknown base
  unsure 1791: unknown base
  unsure 1792: unknown base
  unsure 1793: unknown base
  unsure 1794: unknown base
  unsure 1795: unknown base
  unsure 1796: unknown base
  unsure 1797: unknown base
  unsure 1798: unknown base
  unsure 1799: unknown base
  unsure 1800: unknown base
  unsure 1801: unknown base
  unsure 1802: unknown base
  unsure 1803: unknown base
  unsure 1804: unknown base
  unsure 1805: unknown base
  unsure 1806: unknown base
  unsure 1807: unknown base
  unsure 1808: unknown base
  unsure 1809: unknown base
  unsure 1877: unknown base
  unsure 1878: unknown base
  unsure 1879: unknown base
  unsure 1880: unknown base
  unsure 1881: unknown base
  unsure 1882: unknown base
  unsure 1883: unknown base
  unsure 1884: unknown base
  unsure 1885: unknown base
  unsure 1886: unknown base
  unsure 1887: unknown base
  unsure 1888: unknown base
  unsure 1889: unknown base
  unsure 1890: unknown base
  unsure 1891: unknown base
  unsure 1892: unknown base
  unsure 1893: unknown base
  unsure 1894: unknown base
gggaaagcagcaggttggggcttcttgtggccaacttcagagcctgtcaccaggaaaggtaagcatgggaggaaggaagatggcgacagatgaagaaaatgtctatggtttagaagagcgccactgggaacagcatcctgggccagagacggttcttctccaggctgggggccacgtctgtgaccaggcctgcaccacgggcagccgcaggtgggacaagtgccacgtggaagtcgtggacactccggacattttcagctcccaagtgtccaagacagatcctggctgtgaggagagaggtcactgctacctgctctcggcccccggaccccacgcgctgctcctggtgacccagttgggtcggttcaccgcccaggaccagcaggcggtgaggcaggtgagggacatgttcggggaggacgtcctaaaatggatggtcatcgtcttcaccaggaaggaggacctggccgggggctccctgcacgattacgtgagcaacacagagaaccgggccttgcgcgagctggtggccgagtgcgggggccgggtctgtgcctttgataaccgggccaccggccgggagcaggaagcccaggtggagcagctgctggggatggtcgagggcttggtgctggagcacaagggcgcccattactccaacgaggtgtatgagctggcgcaggtgctgcgctgggcaggccctgaggagcggctccggcgggtggcggacgcgtggcagccagggtgcagaggaggccatggggcgcctggctgtcggcccggctgtggaagtggctgaagtcccccaggagctggaggctgggcctggccctgctgctggggggcgcgctcctgttctgggtgctgctccacaggcggtggtcggaggccgttgcggaggtcgggcctgactgacagcgcaggtcctaaaactgaaggcaacttggttaagggaggctgaattcttggagctgaagggaaaacttcattccaacggaaggaatcctgtagtttcaggcatagttttaatgacacagaaaactttgctgcatcacctttgcaactttgccaaagctcagagttcactttttaagtttttaactcattttaaatgatgtgtatgcagagttttaaaataaattcgtctaacaataacttccttggtagttttggtagtctaatgtcaagtagcttgtagtggggacaaacgcatggcacagggaaaacaagtgccattattttcgagctttttaaaaaatttagactgcccctccttgataattttctagttcttatacatgggtagataggttcctttgtgatccttgtagacttttagcatcaaaaaaagaaatgtgggggttacacacgtgaatgttacttctgagacatcagtttatagtacaatgatttactaccaaaaagatgaatgtaactgtactggtacaaagtgggaaataaccgtttccacttttctagaacatattatggttcatggcattcccaaatgaagtaagnnnnnnnnnnnnnnnnnnnnnnnnnnnnnnnnnnnnnnnnnnnnnnnnnnnnnnnnnnnnnnnnnnnnnnnnnnnnnnnnnnnnnnnnnnnnnnnnnnnnnnnnnnnnnnnnnnnnnnnnnnnnnnnnnnnnnnnnnnnnnnnnnnnnnnnnnnnnnnnnnnnnnnnnnnnnnnnnnnnnnnnnnnnnnnnnnnnnnnnnnnnnnnnnnnnnnnnnnnnnnnnnnnnnnnnnnnnnnnnnnnnnnnnnnnnnnnnnnnnnnnnnnnnnnnnnnnnnnnnnnnnnnnnnnnnnaagaaaaagagtaggatattgggaaaataacatataatatcttctatatggttattcatatttttatnnnnnnnnnnnnnnnnnngtctgtatctcgagctcctctctggttatggagaagaggcagagcaccaggtgcataggctgagactgcagacacctgagcatcctatgctgtgaggcgaaagcatccggttttttcgggatgggcctgtccaggaaggttctcgaatgccacgtgattagaaaatttgccgctgactggttgtgcgaatcaaacaataggatttccttatttctatttctgagcataatgagaaccctttaagggaactcattgtctttaaatcagccagcctctagtgaggtcatggagacatgggaagcaggtattcacattagctctattcaagaggaagaggaggagggagtgtgcgcaggcgccctagggtcttccccagcacacgttgggaagaaggggtctgcaagcatgcgcacaattgccagctcaggctaaggactgcaggaggttccaggtgggttgcgggcttcgggcaggctatggtgaggggtcctgagggccttggtgaccgctgcagggagttggactttttgaagcgtggctcaagaaaaacccatgtttaattcctgcctttcgcttcctcagcagcctttctgggcccaggcaggggcctcgagccaggaaggatcctttgatgaccagaggggacagcagggagggcacagcgtggtcgtccacggtcacttgcgcacgagccagtgctgctgctggtgttagacaacaacttttatcaaagtggtttaatgtacagcagcaacaaagctgctttgtggagcagggctcccaataggcagtgtgcccagagtagcagctcggaagcagtactgcaatcacatttatacccactttcaactatatgcaaatttaggggtggattatgccaaaatttctagaaaaaaggtcgtaacttccaggtcgtgggattgttgctatggaaaggagccaaaacttccagctgttgccttagcaatggtaacctgacgtggcactggtgagtgtgttttatggagagactctttcacctcttccctttcagcttgtcttcagtgtggtctggagcccaatccccacctccagagtctagtcctgcctcctacctcagtaataaaaagtagtagtatatggttaattgtcaaatacatttgcaaagtgtaatcaaagatacattaccaatctgaatctcaaaatgtgctatcatctttgaatttgaataatgtattattaaagaagttacagttttcctttacattcaat

SEQ ID NO: 824 - protein, 265 aa, Human
GKQQVGASCGQLQSLSPGKVSMGGRKMATDEENVYGLEERHWEQHPGPETVLLQAGGHVCDQACTTGSRRWDKCHVEVVDTPDIFSSQVSKTDPGCEERGHCYLLSAPGPHALLLVTQLGRFTAQDQQAVRQVRDMFGEDVLKWMVIVFTRKEDLAGGSLHDYVSNTENRALRELVAECGGRVCAFDNRATGREQEAQVEQLLGMVEGLVLEHKGAHYSNEVYELAQVLRWAGPEERLRRVADAWQPGCRGGHGAPGCRPGCGSG

SEQ ID NO: 825 - DNA, 983 bp, Human
tttccaaaggttcagagctcatctaccaggagccagccaaggccaggttttgaagacaagtctttcttggggaatatgcagggtttgagcaactcagtcctgctgagttaaccctttcttgtacagcaagttagctcttcagggagttagctctgtctatcctgcccctgtctgcctagccactccttttctaggtagagtggaccttgctgttcacgtcatagatggccattccgtgtacctagactcctttttattcctttgccagacaagtaattggaatgctttggatcttaagaacatgtctgtgctttgcaatttcatgtgaccatggtgaaattatgcacacattctatcattgtgattcaacaagtattttttgaatgctgctgtgcatgaggcatggtgttagatggcagattgacagaaatgactaatacaggtatctggcctcaaggagtttacagtttcataggagaaagaaaaacaaaactagcaattctggtaagcagtatgtgttttggagagcacttaacttcatcagagagcatggttgaaggtgtatctgtgtgtatgagaaggtgttggtgataattagaaggcttccctaaagaggtcactcctggggttgagccataaagatcaagtagatacaagtgggcatgaagctagtattttgctgccagtcatttctgtagttaggttgcctatgtggttggagcatgtatgtattgttacaggtgtagtctgcttggcttccctaagagaatgccccagtcctggccagaatatacatgtcttttttagggtttgcaccaaggggaatagagagtgtctggctcagtacaaatctgtttccgttactccattatccagaaagccactgaaatggcattagcctacacttaatgggtggtagtgttttcacacattgcttctcaaaggaggagtatgtgaatgtttagtttgggcctggtaaaaaa

SEQ ID NO: 826 - DNA, 706 bp, Human
agcggccgcctactactactaaattcgcggccgcgtcgacgcagtggttagggatcattcctcaatgcgtgtgagagctgagcctaactgaatgatatgggaaacttgctcagcaatgcaaggaaagagaacgggtggctgcggctgccagtgcgtgctggtgaatgcagcccatgggcggttggtgggttggggaatgatggtaaccaaatttcaaggcctttaaaccatcaccgtgctgtggtcatcgggctttctcttcagcatccctcctaattatctggcctttcccacgtgcctgaggttcctgatctggtgtccacaatgatctgagaactgattcaaggattcttggagccctcagacccaggaagaagagagtttttaggttccaaatgaggagagtaaactttttgttgttcagtttgattatccttcacaacaaagagaaggtactagaaacttggatgagggagatgagacagtggaaaggattcaagcacacagatgagtcacttggattctaagagttaaaaaaaaaaaagtataaggaaacacatttagaaaatatccatgaagtggactcatttgactttgctaactaaaccaagttcaactgaaggaaaattttttactggtgagaggtccaggatatttggcatgttggaacttagaccaattcgaatttataaatcctctaaaagta

SEQ ID NO: 827 - DNA, 2366 bp, Human
tggaactccagctttgttcttaattcaattaattttcaacaatttcttggaatgtggtgtatcagatgaaaggttctttctcagtttggaatcacttgtaggctgtgttctttctggtccaacttcaccactagctttcagtgactcagttttaaatgttattaatcaaaatgcaaagcagttggaaaataaggagcatctctggaaaatgtggagtgttatagtcaccccattaactgaattgattaatcagaccaatgaagtaaatcaaggtgatgccttagaacataattttagtgccatctatggtgcattgactttaccagtaaaccacattttttcagaacagagatttccagtggccaccatgaagactttgcttagaacttggtcagaattatatagagcatttgctcgttgtgctgctttggtggcaacagcagaagagaacttgtgctgtgaggaactttcttccaagataatgtccagtttggaagatgaaggcttttctaatttgttgttcgtggatagaattatttatattattactgtaatggttgattgcattgacttctcaccatataatattaaatatcagcccaaagttaaatcaccacagagaccttcagattggtccaaaaagaagaatgagcccctagggaaattgacttctttatttaaacttattgtgaaagtgatctattctttccacacactgagcttcaaggaagcacattctgataccctcttcactattggcaactcaatcaccagcattatttccagtgtacttgggcatatttctttgccttctatgatccgaaaaatatttgcaactttaacaagacctctggcattattttatgaaaactcaaagcttgatgaagttcctaaagtatatagttgtctgaacaacaagttagaaaagctactgggagaaattattgcttgtctgcaattcagctacaccggaacttatgatagtgaacttcttgaacaactctccccactattatgcataatatttctgcacaagaataaacagattcgaaaacagagtgctcagttctggaatgccacttttgccaaagtgatgatgttggtttatcctgaagagttaaaaccagtactaacacaagccaaacaaaaatttctgctcctgttgcctggtttggaaactgttgaaatgatggaggaatccagtggaccatattctgatggaacagaaaattcacaactaaatgtgaagataagtggcatggagagaaaatcaaatggaaaaagagattcatttttggcacaaacaaagaataaaaaagaaaatatgaaaccagcagccaaactgaaacttgaatcttcgtctttaaaagtaaagggtgaaattcttttggaagaggaaaagtctactgactttgtgtttatacctccagaaggaaaagatgcaaaggaaagaatattaactgatcatcaaaaagaagttctcaaaacaaagcggtgtgatattcctgccatgtataataatctggatgtttcccaagataccttatttactcagtatagtcaggaagagcctatggaaattcctactttaaccagaaaaccaaaggaggattctaagatgatgattacggaggagcaaatggacagtgacattgtcattcctcaagatgtcacggaagactgtggtatggctgaacatcttgaaaagtcctccctttcgaataatgagtgtggttctcttgacaaaaccagtccagaaatgtcaaacagtaataatgatgaaagaaaaaaagctttaatttcatcaaggaaaacatcaactgaatgtgcatctagtacagaaaattctttcgttgtcagcagtagttcagtttctaataccactgttgctggaactcccccataccctacaagtcggaggcaaacctttattactttggagaagtttgatggttcagaaaatagaccttttagtccatcccccttgaataatatttcatcaactgttacagtgaaaaataaccaggaaaccatgattaaaacagattttctaccaaaagcaaagcaaagagaagggactttttcaaaatctgattctgaaaaaatagtgaatggaactaagagatcaagccggagagctggtaaagctgaacaaacagggaataaaaggtctaagcccttaatgagatctgagccggagaaaaatactgaggaatctgttgaaggcattgtagtcttagaaaataacccacctggtttgcttaatcaaacagaatgtgtgtcagataatcaggttcatctttctgaatctacaatggagcatgacaatacaaagcttaaagcagcaacaatggaaaatgctgtat

SEQ ID NO: 828 - DNA, 367 bp, Human
  unsure 79: unknown base
  unsure 80: unknown base
  unsure 104: unknown base
  unsure 144: unknown base
  unsure 164: unknown base
  unsure 183: unknown base
  unsure 207: unknown base
  unsure 264: unknown base
  unsure 320: unknown base
aagcttggaattcagacaacagatccaagtctgggcttgatctcaagctagtgttttgatgttgaaaaaatgttatttnntctttctaaccccatttccttatntaaaattggggatgatgataaattcactgataataagagntaaatgagattcttgaggantcagaatggttctaacatntgtaggtattattagcagtcatantgtagcataagaaaataccgtctgctgaaagagggacaataaagattatctacatgntcatcatttaaaagctaccagatataggaagaaggggccataaaatgataacgttntgatgattaattttgatgcttaggtcagagtccattctaggatatct

SEQ ID NO: 829 - DNA, 1310 bp, Human
atttctctaacattaaaagggcagagtgggaggaggggatgtggcagccgaccactttgaaggccagttttctcaggcaacttagaccatttttagtcaaattttatcttagattcacagtactggtggttttcgagtatattatgttaccttctgaaatagttcctgtcgttttgaggggcttttctttataaaatagtcaactttggctataaaatgttactttagtgtaattccaactggaccagtcttatctgtagcatgcaagaagttcaagtttctcttttatttttaaaagtggcccatgatacctgtaaatcttgggaaatgactgagtacaaaataacggagattaaattgagcttgaaatttatgggggaaatgcagctaactttgtgcttttattttgaagctaaacagttaacagaaacacaattttgtaaacagataatatctgtggtctgttgagttgctaggatttgtctttagatcaattggctttgagaagtcagcttaattccattttacggcccaattttgcctttttccccccctacaggctggccacttgaatacatgtcaaataatcgaaatatgaagaattcatttttattagaaaaggccttaagggtggaatttaagctcctattaacattcattcagtagaacttaggttactgatcagctcttcactgtgtaaagttgatactgattttggaagcagaatattgagtgacacagagccagaagttgtaaaactgcactgcaggtttcctgcccttttgctctgtaagcagtaactccaaatgtcacttcataacagttcttgtcaaccttaggcaggatgtatcaatgcatgtcagatgggggtagataactttggggcaggttatcacaacctaagagttggtggagaaaacatgggaatgaattctagagaccacaaaatgaaaacttgaaagtgttactctttctcagcttaacgtttttaaatccaaaaaacaatttttacatttcttgggattcgaagagttgaacttcaggttgccgtggttacagtgtacagtatatattatcagtctgtaccagtagaccagtaccctaactactgaaaagaatatggcagttttccatttgtctagtttctgtatgtacaatttactatccaattaattacttaagtggatttcttgttcttttttaaaaacttattgctacattgataggcagaatagcttctgaaagtgaccagttttcaatttcataggaagaggtgactcattgaaaaatagctcaagcaaagtcagcta

SEQ ID NO: 830 - protein, 63 aa, Human
FSNIKRAEWEEGMWQPTTLKASFLRQLRPFLVKFYLRFTVLVVFEYIMLPSEIVPVVLRGFSL

SEQ ID NO: 831 - DNA, 353 bp, Human
  unsure 26: unknown base
  unsure 27: unknown base
  unsure 28: unknown base
  unsure 29: unknown base
aattctgcccaaaaggacagcctgannnnctggaccctgggtacctggctgaagactttggactttaacctggagatgatggagagtatgcaggataaagtccataccaaatccaacgcctagcaaatggagaacaagccaaaactaacaagataaaatgtagcaggaaaaagtgcaaagagctgaagtgtggaataagtgggagaggtctgccatgccctatctgaccttgctgccatgatctttaaggctgtgtgtcctggttggtgcagctacaagatggcagaaatgcctaagtgatggtatggaacagaggatccctcttctcaccattgtcttgcatgtttccttgt

SEQ ID NO: 832 - DNA, 3195 bp, Human
  unsure 665: unknown base
  unsure 666: unknown base
  unsure 667: unknown base
  unsure 668: unknown base
  unsure 669: unknown base
  unsure 670: unknown base
  unsure 671: unknown base
  unsure 672: unknown base
  unsure 673: unknown base
  unsure 674: unknown base
  unsure 675: unknown base
  unsure 676: unknown base
  unsure 677: unknown base
  unsure 678: unknown base
  unsure 679: unknown base
  unsure 680: unknown base
  unsure 681: unknown base
  unsure 682: unknown base
  unsure 683: unknown base
  unsure 684: unknown base
  unsure 685: unknown base
  unsure 686: unknown base
  unsure 687: unknown base
  unsure 688: unknown base
  unsure 689: unknown base
  unsure 690: unknown base
  unsure 691: unknown base
  unsure 692: unknown base
  unsure 693: unknown base
  unsure 694: unknown base
  unsure 695: unknown base
  unsure 696: unknown base
  unsure 697: unknown base
  unsure 698: unknown base
  unsure 699: unknown base
  unsure 700: unknown base
  unsure 701: unknown base
  unsure 702: unknown base
  unsure 703: unknown base
  unsure 704: unknown base
  unsure 705: unknown base
  unsure 706: unknown base
  unsure 707: unknown base
  unsure 708: unknown base
  unsure 709: unknown base
  unsure 710: unknown base
  unsure 711: unknown base
  unsure 712: unknown base
  unsure 713: unknown base
  unsure 714: unknown base
  unsure 715: unknown base
  unsure 716: unknown base
  unsure 717: unknown base
  unsure 718: unknown base
  unsure 719: unknown base
  unsure 720: unknown base
  unsure 721: unknown base
  unsure 722: unknown base
  unsure 723: unknown base
  unsure 724: unknown base
  unsure 725: unknown base
  unsure 726: unknown base
  unsure 727: unknown base
  unsure 728: unknown base
  unsure 729: unknown base
  unsure 730: unknown base
  unsure 731: unknown base
  unsure 732: unknown base
  unsure 733: unknown base
  unsure 734: unknown base
  unsure 735: unknown base
  unsure 736: unknown base
  unsure 737: unknown base
  unsure 738: unknown base
  unsure 739: unknown base
  unsure 740: unknown base
  unsure 741: unknown base
  unsure 742: unknown base
  unsure 743: unknown base
  unsure 744: unknown base
  unsure 745: unknown base
  unsure 746: unknown base
  unsure 747: unknown base
  unsure 748: unknown base
  unsure 749: unknown base
  unsure 750: unknown base
  unsure 751: unknown base
  unsure 752: unknown base
  unsure 753: unknown base
  unsure 754: unknown base
  unsure 755: unknown base
  unsure 756: unknown base
  unsure 757: unknown base
  unsure 758: unknown base
  unsure 759: unknown base
  unsure 760: unknown base
  unsure 761: unknown base
  unsure 762: unknown base
  unsure 763: unknown base
  unsure 764: unknown base
  unsure 765: unknown base
  unsure 766: unknown base
  unsure 767: unknown base
  unsure 768: unknown base
  unsure 769: unknown base
  unsure 770: unknown base
  unsure 771: unknown base
  unsure 772: unknown base
  unsure 773: unknown base
  unsure 774: unknown base
  unsure 775: unknown base
  unsure 776: unknown base
  unsure 777: unknown base
  unsure 778: unknown base
  unsure 779: unknown base
  unsure 780: unknown base
  unsure 781: unknown base
  unsure 782: unknown base
  unsure 783: unknown base
  unsure 784: unknown base
  unsure 785: unknown base
  unsure 786: unknown base
  unsure 787: unknown base
  unsure 788: unknown base
  unsure 789: unknown base
  unsure 790: unknown base
  unsure 791: unknown base
  unsure 792: unknown base
  unsure 793: unknown base
  unsure 794: unknown base
  unsure 795: unknown base
  unsure 796: unknown base
  unsure 797: unknown base
  unsure 798: unknown base
  unsure 799: unknown base
  unsure 800: unknown base
  unsure 801: unknown base
  unsure 802: unknown base
  unsure 803: unknown base
  unsure 804: unknown base
  unsure 805: unknown base
  unsure 806: unknown base
  unsure 807: unknown base
  unsure 808: unknown base
  unsure 809: unknown base
  unsure 810: unknown base
  unsure 811: unknown base
  unsure 812: unknown base
  unsure 813: unknown base
  unsure 814: unknown base
  unsure 815: unknown base
  unsure 816: unknown base
  unsure 817: unknown base
  unsure 818: unknown base
  unsure 819: unknown base
  unsure 820: unknown base
  unsure 821: unknown base
  unsure 822: unknown base
  unsure 823: unknown base
  unsure 824: unknown base
  unsure 825: unknown base
  unsure 826: unknown base
  unsure 827: unknown base
  unsure 828: unknown base
  unsure 829: unknown base
  unsure 830: unknown base
  unsure 831: unknown base
  unsure 832: unknown base
  unsure 833: unknown base
  unsure 834: unknown base
  unsure 835: unknown base
  unsure 836: unknown base
  unsure 837: unknown base
  unsure 838: unknown base
  unsure 839: unknown base
  unsure 840: unknown base
  unsure 841: unknown base
  unsure 842: unknown base
  unsure 843: unknown base
  unsure 844: unknown base
  unsure 845: unknown base
  unsure 846: unknown base
  unsure 847: unknown base
  unsure 848: unknown base
  unsure 849: unknown base
  unsure 1990: unknown base
  unsure 1991: unknown base
  unsure 1992: unknown base
  unsure 1993: unknown base
  unsure 1994: unknown base
  unsure 1995: unknown base
  unsure 1996: unknown base
  unsure 1997: unknown base
  unsure 1998: unknown base
  unsure 1999: unknown base
  unsure 2000: unknown base
  unsure 2001: unknown base
  unsure 2002: unknown base
  unsure 2003: unknown base
  unsure 2004: unknown base
  unsure 2005: unknown base
  unsure 2006: unknown base
  unsure 2007: unknown base
  unsure 2008: unknown base
  unsure 2009: unknown base
  unsure 2010: unknown base
  unsure 2011: unknown base
  unsure 2012: unknown base
  unsure 2013: unknown base
  unsure 2014: unknown base
  unsure 2015: unknown base
  unsure 2016: unknown base
  unsure 2017: unknown base
  unsure 2018: unknown base
  unsure 2019: unknown base
  unsure 2020: unknown base
  unsure 2021: unknown base
  unsure 2022: unknown base
  unsure 2023: unknown base
  unsure 2024: unknown base
  unsure 2025: unknown base
  unsure 2026: unknown base
  unsure 2027: unknown base
  unsure 2028: unknown base
  unsure 2029: unknown base
  unsure 2030: unknown base
  unsure 2031: unknown base
  unsure 2032: unknown base
  unsure 2033: unknown base
  unsure 2034: unknown base
  unsure 2035: unknown base
  unsure 2036: unknown base
  unsure 2037: unknown base
  unsure 2038: unknown base
  unsure 2039: unknown base
  unsure 2040: unknown base
  unsure 2041: unknown base
  unsure 2042: unknown base
  unsure 2043: unknown base
  unsure 2044: unknown base
  unsure 2045: unknown base
  unsure 2046: unknown base
  unsure 2047: unknown base
  unsure 2048: unknown base
  unsure 2049: unknown base
  unsure 2050: unknown base
  unsure 2051: unknown base
  unsure 2052: unknown base
  unsure 2053: unknown base
  unsure 2054: unknown base
  unsure 2055: unknown base
  unsure 2056: unknown base
  unsure 2057: unknown base
  unsure 2058: unknown base
  unsure 2059: unknown base
  unsure 2060: unknown base
  unsure 2061: unknown base
  unsure 2062: unknown base
  unsure 2063: unknown base
  unsure 2064: unknown base
  unsure 2065: unknown base
  unsure 2066: unknown base
  unsure 2067: unknown base
  unsure 2068: unknown base
  unsure 2069: unknown base
  unsure 2070: unknown base
  unsure 2071: unknown base
  unsure 2072: unknown base
  unsure 2073: unknown base
  unsure 2074: unknown base
  unsure 2075: unknown base
  unsure 2076: unknown base
  unsure 2077: unknown base
  unsure 2078: unknown base
  unsure 2079: unknown base
  unsure 2080: unknown base
  unsure 2081: unknown base
  unsure 2082: unknown base
  unsure 2083: unknown base
  unsure 2084: unknown base
  unsure 2085: unknown base
  unsure 2086: unknown base
  unsure 2087: unknown base
  unsure 2088: unknown base
  unsure 2089: unknown base
  unsure 2090: unknown base
  unsure 2091: unknown base
  unsure 2092: unknown base
  unsure 2093: unknown base
  unsure 2094: unknown base
  unsure 2095: unknown base
  unsure 2096: unknown base
  unsure 2097: unknown base
  unsure 2098: unknown base
  unsure 2099: unknown base
  unsure 2100: unknown base
  unsure 2101: unknown base
  unsure 2102: unknown base
  unsure 2103: unknown base
  unsure 2104: unknown base
  unsure 2105: unknown base
  unsure 2106: unknown base
  unsure 2107: unknown base
  unsure 2108: unknown base
  unsure 2109: unknown base
  unsure 2110: unknown base
  unsure 2111: unknown base
  unsure 2112: unknown base
  unsure 2113: unknown base
  unsure 2114: unknown base
  unsure 2115: unknown base
  unsure 2116: unknown base
  unsure 2117: unknown base
  unsure 2118: unknown base
  unsure 2119: unknown base
  unsure 2120: unknown base
  unsure 2121: unknown base
  unsure 2122: unknown base
  unsure 2123: unknown base
  unsure 2124: unknown base
  unsure 2125: unknown base
  unsure 2126: unknown base
  unsure 2127: unknown base
  unsure 2128: unknown base
  unsure 2129: unknown base
  unsure 2130: unknown base
  unsure 2131: unknown base
  unsure 2132: unknown base
  unsure 2133: unknown base
  unsure 2134: unknown base
  unsure 2135: unknown base
  unsure 2136: unknown base
  unsure 2137: unknown base
  unsure 2138: unknown base
  unsure 2139: unknown base
  unsure 2140: unknown base
  unsure 2141: unknown base
  unsure 2142: unknown base
  unsure 2143: unknown base
  unsure 2144: unknown base
  unsure 2145: unknown base
  unsure 2146: unknown base
  unsure 2147: unknown base
  unsure 2148: unknown base
gagatcagtatcaacagcagatgaaatagaatccagcaaagagttgacatgttctgcctccggccaactctagaatctttttaagcaggtcagccagtatttgcaacttccacaggatgaattgcttgccaagtttctggcactcttgtctggttggaagagtacatccaaagggtacttagtgatcctttgctaagaagttttttgctgtttccgggttacagatttggccatatatttctaaacagcccctgtaaagttgaaagaaaaagtttataacagtgaacttctgaggtttagttactgcaggctttgttgagaagagattgttacagtgtgatttatggatgatcagggatgactttcccctagcaaatatttggatgcctcctgtttgtcaaatagaatgaatggtgatggtgatgggagggatagttaaacgttttctctgctaggttaacttcttacaggtataattacaatgcctgaaattctgtagtttcatttctttggattagtcgttgtcttttccagattgtacacaatctgatcaacacaaaggtagttagtagatcattaacctcaattgcaaggttataatttctcaaacattaagcatattatcagtcatgtggattcaaacacagtataagaaaatcctcaannnnnnnnnnnnnnnnnnnnnnnnnnnnnnnnnnnnnnnnnnnnnnnnnnnnnnnnnnnnnnnnnnnnnnnnnnnnnnnnnnnnnnnnnnnnnnnnnnnnnnnnnnnnnnnnnnnnnnnnnnnnnnnnnnnnnnnnnnnnnnnnnnnnnnnnnnnnnnnnnnnnnnnnnnnnnnnnnnnnnnnnntcctagaaaattagaaaaagcaacaatagttacttgtgggccaggcgtgagccaccccgtccggcctgtttttaaggcattaattagtattgttaggaaagcagtaacaatgcaaacaccactcttctcttcacaaagatcaccttgagactgtgtctccattccacctgcctgagaagtgggagcatcagcctgttccaggctcttgggtagtagcatagccctttaaaaagagagagccattttccatgtgtttttggataagcacaatttgaaaatcatttcccaaatcctctttttgtttttgattctaaggtaaaattttccctaagccctcccaccatcccctcagccagtattagatgagatttgtatagcagcagaaactgacttataagtagagagctcttcagcaagactgagccttagctgttccatctctttgttcttctgttgctggagttgcaccccatttcttaactgcctctggcgttcttccatttcctccagctgttcctgcatgagatggccaagaacatttctaatgagccaaacaataaaaactcacattgtccactcttacttataaaacacttttttgttcattgtttaatcttgatagcagtattgaggctggtatttatatgataggttatgaaacaggttcaaagaagttgtgtcttggaaaaaaagtgacaatgcttttgaaaatgatgacgaaaaaggcatcttgtctgttaaccacagcttgctttaatagaatcctgggagggtgattgggactttttagtattacaaccttagtgtcattgaggaggattttggtctagttagtgggctgagtttcatatacctctccctccatgtgcaggtttgttaagataattggtagtttttaataatataaaatacttaagttgaaatacaaaagtgtggcaacaattattaaatattggctagaattctaggagagttacacaactagtggaagtccatgtttagaaaataaatggcttgtttaaggaaaagtttttgtgtccaaagctccttaaagtcagagagatttctacctggtacttaacatcatatggaaattgatgctttagtgagggtgttggctatcctattgtcaatttcctgnnnnnnnnnnnnnnnnnnnnnnnnnnnnnnnnnnnnnnnnnnnnnnnnnnnnnnnnnnnnnnnnnnnnnnnnnnnnnnnnnnnnnnnnnnnnnnnnnnnnnnnnnnnnnnnnnnnnnnnnnnnnnnnnnnnnnnnnnnnnnnnnnnnnnnnnnnnnnnncacaaaaagactgaatttggttagttctaagttggaagataaagatggtatgcacaggaggcccttgggagccctcagataactttctcattcttccaaaatcaggctgggatgcattctgtaaattttccctgcctaggatgtatacctgaggaataaggtaaggaagatgtcagcaagtcagcctctggtttacctgctagctggcatggatccttaaggaagcaggagggagttgggaagagaggaaggggtgaagttggtatcttttaaagcgagagtgattttacctcagattttgaagaatactaaggaatccagttgttggggtacatgctattattagaaggatctagataatttgtcctctgagtcatacttgacattgtacctgtggcacatcaatccgcactgtttgatactctggctgaatctcagctttcaccaacattgtcaaaggaccttttttagtgcccagccatgcctaagagtgtgtcatctgaagagggaagcatctgcatactgctgtcctgattgctcagtcctcactacctaccagacccgttggtaaggtacaaaagtacatgcttggaaaagcagtctgcaccaccagtgataagctgtgacagagtggaacagcctcaatgaaatgaaggaaggattgctacagtggcattaaggatggtctcttaatcctgtgttaaccactagattaactttacaatcaactcaaaatccttcaaaggctttccactttctttagtggcattcagaccccctctagtttgacccctacctccaacttgaacctctgttactcttccgtatgaacattttcctctagccctggactactagtaccgaagtcactagtcacataggactcatttgaaatatgactagtctcaattgagatgtaatgtaagtgtaaaatacacagcagatttctaagacagcacacaaaatgtaaaatatgtcaaaaatatttgatactgattacatgttgaaatatatgtgttgggttaaataaaatgcattaaagttaaa

SEQ ID NO: 833 - DNA, 300 bp, Human
  unsure 98: unknown base
gttatgacatacttggagcggcatgatttcaagaagccattccaaattcttatagctccttagctctggttttactctcgtattttccccaagaaaantttttggctattcaaagaaagcacaaaatatgtgatgtggaactcatgaaaatagggacttttgatatctctttaaatattccctgactcacggaaaagatgtcctcttttggtgtatacattgtgaaaatctacccatttatctctctctctctcttttcttttaaataaattatctgataaggccggcaaggtggctcac

SEQ ID NO: 834 - DNA, 863 bp, Human
aggatgtagtgagctatgggagcacggagtgcactccaggtggatgacagaggtgggaccctacctctatgagaaatgttaaaatgtagaacattgataaaattaagtcagttattttaatctgaagccaagaacatgtagaatgttatgattagagtttatcacatattaatgtatactggcaaattgtgttactggagtatacccataggaggaataaattcaaacctgttttatttatttgaacctatttacggtatgcttaagaattgaatcagtataaattctcaaatatgggagaaattttgttcttgagaattatctgagtcattaatatttttcaaaaacagctctcactgacttgaacctcttctgtaagctctaaccttttacctgctttacatttccacttgaatgtctagtaggcatctcttgaccaaaaacagcttttgattcctgttctccaacctgttcctctcctagttttctccatctcagaaatgttacttcctctgcaaagtctttccctgacttatctaaaataataacctcctctgtttgctgtgggaatttgtatagaatggtgggaaaatttcaagtttcatatttggattagctctgacatttatttatctgaacactggtaattgcctcagtaaagacactgataataagtaccttttagagttattttaatctttaatgctttaatgtgtaggaagagtatagtgtcctgttttgcacagaaaggcattctgtaaataataagttgccttaattttcctgtaatgttcattatattgttgtgggaaggtatttactcctattattaaaaataaaaatgtgtaaaatttactacctga

SEQ ID NO: 835 - protein, 26 aa, Human
GCSELWEHGVHSRWMTEVGPYLYEKC

SEQ ID NO: 836 - DNA, 331 bp, Human
  unsure 174: unknown base
  unsure 175: unknown base
  unsure 177: unknown base
  unsure 178: unknown base
  unsure 181: unknown base
  unsure 182: unknown base
  unsure 183: unknown base
  unsure 184: unknown base
  unsure 185: unknown base
  unsure 187: unknown base
  unsure 188: unknown base
  unsure 190: unknown base
  unsure 192: unknown base
  unsure 193: unknown base
  unsure 194: unknown base
  unsure 195: unknown base
  unsure 196: unknown base
  unsure 197: unknown base
  unsure 198: unknown base
  unsure 199: unknown base
  unsure 200: unknown base
  unsure 202: unknown base
tggcgcgcaacgacatgagcatcgccgaggagctgctgtacctgcgcgtggtgcgtggcctaatggccgccatgggcaacacggaccacagcaacagccagcggctggccagcctcacgctggagtgcttcgtgcagatgttccccttggtggcggagcacgtgcgcaagtgcnngnnggnnnnncnntncnnnnnnnnncngagcaacgctgaggacttgtacatgaaaatagacagcattcaggcggacatcttggcggccaacacagtcaatgttaccaaagccctgtgcctccatggcagctcctacagcatgaacactctctatgg

SEQ ID NO: 837 - DNA, 1163 bp, Human
  unsure 893: unknown base
  unsure 894: unknown base
  unsure 895: unknown base
  unsure 896: unknown base
  unsure 897: unknown base
  unsure 898: unknown base
  unsure 899: unknown base
  unsure 900: unknown base
  unsure 901: unknown base
  unsure 902: unknown base
  unsure 903: unknown base
  unsure 904: unknown base
  unsure 905: unknown base
  unsure 906: unknown base
  unsure 907: unknown base
  unsure 908: unknown base
  unsure 909: unknown base
  unsure 910: unknown base
  unsure 911: unknown base
  unsure 912: unknown base
  unsure 913: unknown base
  unsure 914: unknown base
  unsure 915: unknown base
  unsure 916: unknown base
  unsure 917: unknown base
  unsure 918: unknown base
  unsure 919: unknown base
  unsure 920: unknown base
  unsure 921: unknown base
  unsure 922: unknown base
  unsure 923: unknown base
  unsure 924: unknown base
  unsure 925: unknown base
  unsure 926: unknown base
  unsure 927: unknown base
  unsure 928: unknown base
  unsure 929: unknown base
  unsure 930: unknown base
  unsure 931: unknown base
  unsure 932: unknown base
  unsure 933: unknown base
  unsure 934: unknown base
  unsure 935: unknown base
  unsure 936: unknown base
  unsure 937: unknown base
  unsure 938: unknown base
  unsure 939: unknown base
  unsure 940: unknown base
  unsure 941: unknown base
  unsure 942: unknown base
  unsure 943: unknown base
  unsure 944: unknown base
  unsure 945: unknown base
  unsure 946: unknown base
  unsure 947: unknown base
  unsure 948: unknown base
  unsure 949: unknown base
  unsure 950: unknown base
  unsure 951: unknown base
  unsure 952: unknown base
  unsure 953: unknown base
  unsure 954: unknown base
  unsure 955: unknown base
  unsure 956: unknown base
  unsure 957: unknown base
  unsure 958: unknown base
  unsure 959: unknown base
  unsure 960: unknown base
  unsure 961: unknown base
  unsure 962: unknown base
  unsure 963: unknown base
  unsure 964: unknown base
  unsure 965: unknown base
  unsure 966: unknown base
  unsure 967: unknown base
  unsure 968: unknown base
  unsure 969: unknown base
  unsure 970: unknown base
  unsure 971: unknown base
  unsure 972: unknown base
  unsure 973: unknown base
  unsure 974: unknown base
  unsure 975: unknown base
  unsure 976: unknown base
  unsure 977: unknown base
  unsure 978: unknown base
  unsure 979: unknown base
  unsure 980: unknown base
  unsure 981: unknown base
  unsure 982: unknown base
  unsure 983: unknown base
  unsure 984: unknown base
  unsure 985: unknown base
  unsure 986: unknown base
  unsure 987: unknown base
  unsure 988: unknown base
  unsure 989: unknown base
  unsure 990: unknown base
  unsure 991: unknown base
  unsure 992: unknown base
  unsure 993: unknown base
  unsure 994: unknown base
  unsure 995: unknown base
  unsure 996: unknown base
  unsure 997: unknown base
  unsure 998: unknown base
  unsure 999: unknown base
  unsure 1000: unknown base
  unsure 1001: unknown base
  unsure 1002: unknown base
  unsure 1003: unknown base
  unsure 1004: unknown base
  unsure 1005: unknown base
  unsure 1006: unknown base
  unsure 1007: unknown base
  unsure 1008: unknown base
  unsure 1009: unknown base
  unsure 1010: unknown base
  unsure 1011: unknown base
  unsure 1012: unknown base
  unsure 1013: unknown base
  unsure 1014: unknown base
  unsure 1015: unknown base
  unsure 1016: unknown base
  unsure 1017: unknown base
  unsure 1018: unknown base
  unsure 1019: unknown base
  unsure 1020: unknown base
  unsure 1021: unknown base
  unsure 1022: unknown base
  unsure 1023: unknown base
  unsure 1024: unknown base
  unsure 1025: unknown base
  unsure 1026: unknown base
  unsure 1027: unknown base
  unsure 1028: unknown base
  unsure 1029: unknown base
  unsure 1030: unknown base
  unsure 1031: unknown base
  unsure 1032: unknown base
  unsure 1033: unknown base
  unsure 1034: unknown base
  unsure 1035: unknown base
  unsure 1036: unknown base
  unsure 1037: unknown base
  unsure 1038: unknown base
  unsure 1039: unknown base
  unsure 1040: unknown base
  unsure 1041: unknown base
  unsure 1042: unknown base
  unsure 1043: unknown base
  unsure 1044: unknown base
  unsure 1045: unknown base
  unsure 1046: unknown base
  unsure 1047: unknown base
  unsure 1048: unknown base
  unsure 1049: unknown base
tacctggggttggatcattggcctgacgtttgcaaattgaggaaccttagggcaaatcagtgaacttctgaactgccttcgtcttcagttatatggggatttccccacttttgagatccttgtaaggattatatgagatgaagagatgagacaaggtatataaaagtcctagcacagagcgtgtcatataatatggcttcacaagtaccctcatctcctttccagtcgttttttgtttttgtttttgtttttttgagactccatctcaaaaaaaaaaaggaaaccaaggatatagaataaaacaagagtgtagatttgggcattgaggccttcaaattggattgttctcaatgtccagaagaaaaaaaaaatttagaagagaccccaatcaggaaaacaaaagttgggctgaattcaatgcgaattattttctagctcaatattaatactgcttatgtcagctgaatttcagcctttcaataacagctagtcaagtatttttttagttggttcctattgatcgtcatcttattttagtggaatccattatattgaagatgtcaagttcctcatttcccatacaaagaatgtgagattcatctttcttgaatctttgctaagtgttgaaggggacttttggcatcttttcaggaggactataattgggccctctaactaaaaagtctcctatgccccttagatagatgagatttttttttttgaccttgtacccaccaacattggtgggaggctcagaagggactgtgtttgtaactttgtagcactttctaaacagtgacctgttgtatgggcattataggacagtccgtggggtggggcgggggatgggggagatggacaaatgaggtctggtttaaagaatgagaagtgtnnnnnnnnnnnnnnnnnnnnnnnnnnnnnnnnnnnnnnnnnnnnnnnnnnnnnnnnnnnnnnnnnnnnnnnnnnnnnnnnnnnnnnnnnnnnnnnnnnnnnnnnnnnnnnnnnnnnnnnnnnnnnnnnnnnnnnnnnnnnnnnnnnnnnnnnnnnnngaagaggtgtgtatccttctaaatgataaaacagatcactcccctgcttacataaaactttccggtgtgagccaccgcgcttggccagaggttttaattttaacgtagtccatt

SEQ ID NO: 838 - DNA, 1046 bp, Human
gaagaagaagaccacaaaagacatgactatccaactttttatgacaaactgcaaggaataaaggaagaataagtccatgtactgtaccacagaagttctgtctgcatcttggacctgaacttgatcatcatcagcttgataagagactttttgactctatatccttgcagttaagaagaaagcacttttttgtaatgtttgttttaatggttcaaaaaaaatctttcttataaagagcataggtagaattagtgaactctttggatcctttgtacagataaaggttatagatttcttgtgttgaatattaaaaaagcaaggatgtctaaccattaagattatccaaagtcaggcgtgagccactgtgcctggccccaagttttgcatcttttaatgccctctgaacaaatacatagagaaaactctcagaacaattaaaacctgcagagcaacagtgtcctccatgtcttaggtttcaagtttgcctctaaaattctaatccatatttttctacttctcagataatttatgtgtgtgtactcttcctagacgtacaagagactttttaatgctaaatatttgtcagtgcttaacaaaaactcaatttcacattactcatattgtttttgttttaattgaatgtgaattaaatttttattagttatttgatttggaatgttatgtatgccattaacactattaggggaatctctagcatttctgtatttttaaagaatttgattcttttgtagattctgcctgtgtggtcattttaaaacatgtgtgacatatatcagtaccttcattcttctatattttgtgtctcctccaacctccaactttttttgttttttgaaaaatgtttctctaacacctcaacagtttaaggtaatttagtacacatatatcagtatttttgtgatctgaaaaagcaacccattttctaaattcatatttttcctaaaactttactatgtttttattttaagaggtttcctgttatatacactttttacacatgcaaataaactttataccaagtgagt

SEQ ID NO: 839 - protein, 9 aa, Human
MQINFIPSE

SEQ ID NO: 840 - DNA, 982 bp, Human
tccagagctagttggtcggaggataataaaccactatccctgactttttctgtgatccttgcgaatatcttgcagatttgtttggagtacctctctcttctgaagcctgtaaccttacctatttgtaaaatagatttaagttctcctgctctctggtatctcaacatagggggagaaaagacccaatttaagtaacttttatagatctaaatttcgaaggaggatcctttcttattcaaaaccgaactaaaactaagtgacttgattcacagaaatcttaatattgagatgtctaaattgggtgggtttcagcacgtaaatgttgacaactaatagacattttaccatcgctgtggctttaccttgttgtggaagttgggttcggacaccaggataatagaatcttcctctcatttcccccagatccttgacagtataacttgatgacttctaatcctaaggaattgcataccttggttttcaggtacagccatttaaacagggtgcagtgtattgacagttcaaggaagtccaggagtcgcgtggatttgtgtgctacaattttgttgtggaaaattgtactgtaatacttctcttggtactgtaagaatttttaatgtagaaattatgctctgtaatgttgtttttggaaataaaactgtttaaactctttgggttgtttaaccttttaaagtgaaatagctgtgacagtgaaatgttacttttgagagtagtgtcttaaatctaactttacagataagccaagtgtatgtagtagctcagattgtctagttgggcactgactttcagcacattgtctcatgagacactacctcttaatttattttacttgtatcaactttagagtagcatggccatttgtttattttttaataagtgatttgtttttaaaaattaaagtacttgtgaccctcaaaaaaaatctatgtcgggtgcggagaaagaggtaatggaaatggca

SEQ ID NO: 841 - protein, 64 aa, Human [sequence omitted]

SEQ ID NO: 842 - DNA, 1870 bp, Human
  unsure 1107: unknown base
  unsure 1108: unknown base
  unsure 1109: unknown base
  unsure 1110: unknown base
  unsure 1111: unknown base
  unsure 1112: unknown base
  unsure 1113: unknown base
  unsure 1114: unknown base
  unsure 1115: unknown base
  unsure 1116: unknown base
  unsure 1117: unknown base
  unsure 1118: unknown base
  unsure 1119: unknown base
  unsure 1120: unknown base
  unsure 1121: unknown base
  unsure 1122: unknown base
  unsure 1123: unknown base
  unsure 1124: unknown base
  unsure 1125: unknown base
  unsure 1126: unknown base
  unsure 1127: unknown base
  unsure 1128: unknown base
  unsure 1129: unknown base
  unsure 1130: unknown base
  unsure 1131: unknown base
  unsure 1132: unknown base
  unsure 1133: unknown base
  unsure 1134: unknown base
  unsure 1135: unknown base
  unsure 1136: unknown base
  unsure 1137: unknown base
  unsure 1138: unknown base
  unsure 1139: unknown base
  unsure 1140: unknown base
  unsure 1141: unknown base
  unsure 1142: unknown base
  unsure 1143: unknown base
  unsure 1144: unknown base
  unsure 1145: unknown base
  unsure 1146: unknown base
  unsure 1147: unknown base
  unsure 1148: unknown base
  unsure 1149: unknown base
  unsure 1150: unknown base
  unsure 1151: unknown base
  unsure 1152: unknown base
  unsure 1153: unknown base
  unsure 1154: unknown base
  unsure 1155: unknown base
  unsure 1156: unknown base
  unsure 1157: unknown base
  unsure 1158: unknown base
  unsure 1159: unknown base
  unsure 1160: unknown base
tgcagaaggtccagggcctggccaaggggatgatgccctgtagcactttgctttgcaggaagggaacaactgtgctgtgaataccaggatccaggagggagggagggtatatctgtgtcccccagctagggacaaggcttccttaaccttaggtcctcatgcttatattagttcttctccaacaaagtttgactttgagaagaagctggcacatggctgaaatgcactcacgcggttgggggaagagtgttcttccagtcctcctccccacagggcctcctgcttctcctaagtacctgtcatcaaaggagatgaagatgaatcccccttcagcccccacacctcaatgagttgtcaagtactctccctcccacttgaataggaagcaggagcagcaggccaggttgcaggttgaggaagtcagaagttaacttgagctgagtttgcagctctggagagattgaggagcagacttttctcttgtcactttggaaggagaggattgtgaggctgcccctttaaatagcattcccgtaggaggcagatcacatccatccgtcacctactgccaaagcatcatttttggtttctatcaaactcaaagcttgttggaaaggattgtggggttaggggagtgaggaggcagagcctcctaggggtagggggcagtttagaagctgaaaaggagaggaatgagaaggagcctgggaaaggtgggggatgaggacaagaggaaaagacagggagagaatagttgtcttttgagcctcagagtggaacaagtatacccaattcttatctgtttagagacgcagcaaggtagaaatgggattgtattgcaacaagaggaatgaggttgagactaaacaccaggactggtgactaaagaaagtgaaaggagccacagagtgaaaaaggctgatagacttggctctggttttatcacttactctctgtgagaccctataatttttctgggttagtttagttctcatttatttttatttttactttttccatcaaactgtgttgtctatgaagttttcccatttattaaatgaagggaattagagtggatgaactctaatgtctctttcacgaataacnnnnnnnnnnnnnnnnnnnnnnnnnnnnnnnnnnnnnnnnnnnnnnnnnnnnnnaattagccttaaaatgaatcaggagcagggggtcttgggagagcaggatgtgacactgtgttaacaagaaatgttgagagagccctctggatgtatgtcttgcctctttcccacctattctagtttaaagacctgcctaaatttggaaactccttagctctaatcctaatttactaattagagctctttagcaccatcctaatttgcaattcttttgtagtttccagcccatttcattttcagttgataaggaggagattgctcccaaattttcagaaatggactgtgtaggagtgtgactagggtctcagatgcagccatttcttggctgggtctggggaaaagccaagggatgtgtgctaaaggtagatggacagagggtgggaagtcccttattatttccacttttttctccatctctgactctgccatctctttctgcctctgtactttctgggagctggttctgctgatacttctgctgaatctaaatgctgacctaacttggcaattcttttatgttaggagtcttagctgtgacagttcatccgcttcttcgcccttccatttcacttcttttctccttctctgactgggagaggaggagcctccactcagtatttagaacagagtaaataccttctcctgatcactcctccttccaacctccagaattttttgaaattaaaattcacattctgggatcctgg

SEQ ID NO: 843 - protein, 79 aa, Human
MCAKGRWTEGGKSLIISTFFSISDSAISFCLCTFWELVLLILLLNLNADLTWQFFYVRSLSCDSSSASSPFHFTSFLLL

SEQ ID NO: 844 - DNA, 468 bp, Human
  unsure 67: unknown base
  unsure 68: unknown base
  unsure 69: unknown base
  unsure 70: unknown base
  unsure 74: unknown base
  unsure 75: unknown base
  unsure 76: unknown base
  unsure 78: unknown base
  unsure 89: unknown base
agagacggggttacattgtactggccaggatggtctagatttcctgaccttgtgatccaccccactnnnntccnnngntgctgagattncaggagtgagccactgcgaccggcccatgagtctttattaatagagatttcttactggtgttatgtggcagattctgcatattcctcacccatcatatgtattccactttcctttattatggggaaaactactctttttggcatgatacaatgttgactccattttctttgctaataaggacttggtatcaatttatcagtatgtaaagtttaccatagagtattgtctcatgtgaatcattcccattttttgctctttactctttgtcgttatttctgagtattatttggatggttcattttgacttaaggatagccctgtgatatgacaatatttttatctaatctgatggagaaagcatttagtctcctgatcaag

SEQ ID NO: 845 - DNA, 696 bp, Human
catgagaccagcactgtgtgggtctgaatgatggctttggtgttcagtttagcacacgcggtctaccacgtctgcatgagtggtaaatgtagtgcctgggtcaaaatgttccttctgttcaaatcgaaatacctcatctctatggctctatggctgtacattaggacctagaacagtggcccattgctcttagactggaaccatgtccactaaaataaacctaagcagatgttgtagacctagccccacaggactgcatttagctgcttcagtgacactttgatgaaagtatggagaagtggagacattatagataaaatatatcaattcccagagaaaactcttgacttaaaaacttaactgtagtaaatatatctttttcaggtgatgaattatttttttaaaaaaggttacatataggaattctgcagtataatttggaggctattagtgctatattaatggaaattaattattttttaagtaagtccaaaaaataatctagaaagtaagtttccagagcaaatctgacctagcatttggtatgctaggctctgcttttcatgattttgaaataaatcataattagacttaacaatatggagaaaataaacttgtatttttaagtgttctgttggcttattttctgtttcatccaactcaataattctgataaataaatttggttctagtttg

SEQ ID NO: 846 - protein, 47 aa, Human
MMALVFSLAHAVYHVCMSGKCSAWVKMFLLFKSKYLISMALWLYIRT

SEQ ID NO: 847 - DNA, 772 bp, Human
gcagccataagagaggtgaatgggatgggaatttaagatactattttaatatcacaaagaggttacacaactaaggatgaaagttagaagctatgaattggtccacatactctgcatgtgctgtctgctagaggctgcaaggcgagctgcttcactgtttcatgttccaatctccaccacccagactcctgctccaataacatctctagatctattcacttgtaacaaatggagcccagttctcctccctccccaaggaggccagacactcgatataatgaaaagaacacaggattcagacccaaacaaatttgtgtccacattctgattctgccatttactctccatgccatgtgcccctgggtgcgtttcttaaccactctgaacttcggttcttaatgcttaaaaatggggagcagtatttgttttatagaatctttgggagtattacacaaaattctaaagacagtgtctggagcctagaaaacgctcactaaattctgattatgactgtttcaaggtgtgactaatcaggatgcctggaaccctacgatggaggcacttcagtttctgggccttgctgaaacattcttgaaaagaggaaacaataaccgtagcctgagatattcgttcctttttttttttactctttggagagtacttaaaaaaagaagaaaaaagaaatagtcatagtgattggcatgctattctacctctacatttccaggaaatatacatggtactttttcttatagaaacagcatctcctccc

SEQ ID NO: 848 - DNA, 508 bp, Human
  unsure 143: unknown base
  unsure 248: unknown base
gtgttaaactgctactgttggttatagatcatgagaactgagtaagtttaagaagtccagagacttctacctgataagtggtagagccagtgattaaatataggtgatctgaatctaagtcctacttgctaatttatctagtngcctttaccatattttattatatgtttatttacttattggacataaaattattagccttctaaactttgatttaaatgtggactggctgaatgcggtggctcacncctgtaatctcaggactttggaggttgaggtgggagggaattgcttgaggccaggagttggaggctgcactaagctgtgatcgtgccactgcactccagcggtgacagagtgagaccctgtctgaaaaaataaatgtgggccagaccatagaccaagtagttatagcaaaagagagtttctaaattactcacaacagaacttccattcttaaactagtcttttgctttaatccactggtacccaatccttagcagttata

SEQ ID NO: 849 - DNA, 504 bp, Human
cccagcttgcgaccattggcactgggagggcctggcttctgggctgatgggtcagttgggccttcataaacactcacctggctggctttgccttccaggaggaagctggctgaagcaagggtgtggaattttaaatgtgtgcacagtctggaaaactgtcagaatcagttttcccataaaagggtgggctagcattgcagctgcatttgggaccattcaaatctgtcactctcttgtgtatattcctgtgctattaaatatatcagggcagtgcatgtaaatcatcctgatatatttaatatatttattatattgtcccccgaggtggggacagtgagtgagttctcttagtccccccagagctggttgttaaagagcctggcacctacccgctctcacttcatctgtgtcatctctgcacactccagcccactttctgccttcagccattgagtggaagctgccccaggcccttaccaggtgcagatgcccaatcttgatgcc

SEQ ID NO: 850 - DNA, 882 bp, Human
tcgataaattttgttgaatgaaagaaaaaaggcaaattaaggtatttattcagtaaacaaaaagggatagtgaagaaccaagctccaggacttttgaagatagactttcttgtctgtggtgcactgagaatcagctctatcttagtattcatttacgtgtggagatctagaacagagttacattctttctggtgacaagctgagactacctggctgctcaatatccagctcctgggagacaagggcctcaaaactgttgggattggggggtggggcaggtagggaatcttactaccatttgttaggatttttaccatcaaacctaggagtagcttggaactgggtaagatcttagaatttagagaagccatagcctgaacaccacacacttctcactgaggaagataggggtgataagatcatggaggaactggagaggaatatgaagacagtgcctacaaccaccacatacacagtaaacattctctcttctcagtggttgaagttgttcttgattacagctctcttatctgttctccctttgatttgctgactgatggatgcagtccatttaagaaatgagcatagcatattggaaagagcactagacttagattctagtcccagttctgtcacttaacagctatgtgttgaggtgaggtgagggaagagtacttggatctctggatctcttttaactttaatattctcctctataagggtagaagatgaactagaggatcacaacagtaccatttagttttccgttcagtggcaattttgacatacttttttgagcatacataatctcagaatcctatgcctcaaaactttgattcattggacagatttcaagaaaaatataatttaacaaatgtaata

SEQ ID NO: 851 - protein, 36 aa, Human
MKTVPTTTTYTVNILSSQWLKLFLITALLSVLPLIC

SEQ ID NO: 852 - DNA, 371 bp, Human
atcttctgcccataatgtacccataaagtgtacccataatgacagaacaatttgggcaaatgtgcttgtactccaggagtcctgaaggcatagttcaatgtgaccctttgagaaatctatgattctttgcagtcttcatttttatcttaagaattcatgcagattttgcatctgctactccataatgtttattttagtataaaaatatttaaatttttaaaattaacatcacttatccccactgctgtataccttgatttggaaagtaaggtggtatgcacaatcacattgaattcatagtaagtgctgagcagattggtatcttatgtttgtcgaatgtttgagttgcacacacaaattaggcttctaga

SEQ ID NO: 853 - protein, 4 aa, Human
IFCP

SEQ ID NO: 854 - DNA, 786 bp, Human
aattgattgggagttctttgtggccaagacttgtcaactgatagctttaaggggaatgtatgctgattcctaattgttatcctccatccctctatcttatctcctgttgcaatcataaatgatggctggatgactactccattcctctggatgtaaaatctacattctcttgcctgaggtggatacgtttgcttgggttctgtttaaggagatggggccagcagtgtgtttcagggcctgtgaaatgtgttctctatccgggcttttgcttaatctctgttttcagtcttgcctatcagtcccactgtcgggggtacctcgtgtctgagtctagaacctttccaggttgctgtgggacagattagcctccttgttctcagtatccccctgacctccacctttattgctttgctccatgaattaaccattttccatgtactgtcattgtctaatgaagatgaattctcttctgttggtaaccccattccttttttgtaattgtgtgcttatacaatgtttattcttcactgtatttctattggagcctcaggacaaagagcagatggtgagaatctgtgttcagtgttaagttttccttctgtaagacatgtgcaacttgtgtttttcactgaatagatcatggacttaatgcatatagagctactttgtttttcatgattgtgccttcaattatatgtagaaatataatttgtgaattgcctgatgaaattttcctaattttgaattatctttgcattcctataataaacactgttagaatggcaa

SEQ ID NO: 855 - DNA, 293 bp, Human
ggacaaggatatcaaataactactgttcaatctttactcaagtgtggaaattttgcctgaagtcctccacctaaaaacctgatgccattggtaatgatgtttatgaagataagatcaaagcacagaaaataatatatgtatatatatgtatatatatctggttgaaatactatatatatatatatatataccagctattaattctaggaaatggagtattaagggtgcattttatttcattagttttacttttatgcattttcttcatatcatattttgcattcagaattttc

SEQ ID NO: 856 - DNA, 2189 bp, Human
gctcgggtcccactcatcccatggcccatcacctgcctgcagccatggagagccatcaggacttccggagcatcaaagcaaagttccaggcctctcagccggagcccagcgacctgcccaaaaaacctccgaagcctgagtttggtaaactgaagaagttctcccagcctgagctaagcgagcaccccaagaaggccccgctgcctgagtttggtgcagtgtccttgaagcccccgccgcctgaggtcactgacctccccaagaagcccccgccgcctgaggtcactgacctccccaagaagcccccgccgcctgaggtcactgacctccccaagaagcccccgccgcctgaggtcactgacctccccaagaagccgtccaaactggagttgagtgacctctccaagaagttcccacagctgggggccactccgtttccaaggaagcccctgcagcctgaggtcggtgaggcccctttgaaggcctcgctgccggagcctggtgcgccggcccggaaacccctgcagcccgacgaactcagtcaccccgccagacccccctccgaacccaaatccggcgcattccccaggaagctctggcaacccgaggccggtgaggctaccccgaggtccccgcagcctgagttgagtacctttcccaagaagcctgcgcagcctgagttcaacgtgtaccccaaaaagcctccgcagcctcaggtcggtggcctccctaagaagtccgtgccgcagcctgagttcagcgaggccgctcagactcccctctggaagcctcagtccagcgagccgaagcgcgactccagcgcctttcccaaaaaggcctcccagcctccgctgagtgactttcccaagaagcctccgcagcctgagcttggggacctcaccaggacctcctcagagcccgaagtcagcgtgcttcccaagaggccgcggccggccgaattcaaagcgctctccaagaagcccccgcagcccgagctgggcggcctccccaggacctcctcagagcccgagttcaactcactccccaggaagctgctgcagccggagcgccgggggccaccccgcaagttctcacagcctgagcccagcgctgtcctcaagagacacccgcagcctgagttcttcggtgatctccctcgaaagcctccactccccagctccgcttccgagagctcactgcctgcggccgtggccggcttcagctcccggcacccgctcagccctgggtttggagcggctgggacaccccgctggaggtcaggaggcctggttcacagtggaggggccaggccaggcctcagacccagccatccaccccggcggaggcctctgccccctgccagcagcctgggacaccctccagccaagcccccgctgcccccggggcccgtggatatgcagagctttcggagaccctctgcagcatccatagatctacggaggacccgctcggccgctgggctccacttccaggaccgacagcctgaagacatcccggtcccagatgagatctacgagctgtatgacgatgtggaacccagagatgactccagccccagccccaagggcagagatgaagcgccctcagttcagcaagccgccaggaggccaccacaagacccagcgctcaggaaggagaaggatccccagccacagcagttgccacccatggacccaaagttgctgaagcagctgaggaaggcagagaaggccgagagggagttccggaagaagttcaagtttgaaggggagatcgtggttcacacgaagatgatgatcgaccccaacgctaagacacgtcgcgggggtggcaagcacctcgggatccggcgcggggagatcctggaggtgatcgagttcaccagcaatgaggagatgctgtgccgggaccccaaaggcaaatatggctacgtgcccagaacagcgctcctgcccctggagacggaggtgtacgatgatgtcgacttctgcgatcccctggaaaaccaaccactccccctgggacggtaagaccggtaggcgtggggccaggacagccagccagcccagcgcccgctcacccaggagccctggatcccggcgcgggaaagtcacagagctgcctgggcttgtacctggccacataaagccccagtttaaagcaaaaaaaaaaaaaaaaaaaaaaaaaaa

SEQ ID NO: 857 - DNA, 372 bp, Human
  unsure 65: unknown base
  unsure 67: unknown base
  unsure 68: unknown base
  unsure 80: unknown base
  unsure 89: unknown base
  unsure 90: unknown base
  unsure 100: unknown base
  unsure 107: unknown base
  unsure 118: unknown base
  unsure 166: unknown base
  unsure 208: unknown base
  unsure 209: unknown base
  unsure 210: unknown base
  unsure 211: unknown base
aaacttcttaattatggaggtacatctccaatacctaaaattaaaaataaaatgaagtgcatttncnncctaagattttnctcatcaannccccgagaanccactgnctggaaattancctgaagaagaaatcttaccttgctctgtatctttaggaaatgttttncctaattttagaaggaggggaaaagaacgataacatcacagnnnnacacacacacacacacacacacacacacacacgacacaaacacaggcacacactgtagtttcctaagcagtttgttctaattcttcacatccccctgtcaaaatgtttgcttatagctttctttgtattgtcatttaagcccatttctaattggtgattgt

SEQ ID NO: 858 - DNA, 509 bp, Human
  unsure 53: unknown base
  unsure 56: unknown base
  unsure 66: unknown base
  unsure 82: unknown base
tattaatcgtcaactgtggccaaaattgagtttcatgagacaaagggggaccnccnaacttctacnggtaatgtctgccttntgctagatagactggctattacataaccatatgtagtttatttttaaggagaattacatatttttcttcacatgtcactgttagaagtaaatcccaatagtaagatttccctaaacaaagtatttcttgtaacatataactcataatatttagaaattacagactttaacctttagaataatcatggtttgttttgtttttgaacttactacctcagagtcacatggtatatatcccctatgatacctgtaaaagacatctaaattggtcaattcttaaatattttattgtgctaacacaaaagttttattttatttggagtgcataagatacagaaacaattctttatgatcttacatctctgtttttttaatattgcaaataacataccactttgacataggcagtttctcacttacaaaagtaa

SEQ ID NO: 859 - DNA, 1524 bp, Human
gcgtcaccgaccggtgcggacaggaagaggctctgggctggcacatgtgtatggcggtgaggcgggcgggtacatggcgggctctgtgggactggcgttgtgcgggcagacgttggtggtgcggggcggcagccgattcctggccacctccatagcaagcagtgatgatgacagcctcttcatctatgactgcagtgctgcagaaaagaagtcacaagaaaataaaggggaggacgcgcccttggaccaggggagcggtgcgattctggcgtccaccttctccaagtctggcagctattttgctttaaccgatgacagtaagcgtctgattcttttccgtacaaaaccatggcaatgtctgagtgtcaggaccgtggcaaggaggtgtacagccctgactttcatagcctcggaggagaaggtcttggtggccgacaagtctggagacgtctactccttttcggtgctggagccacacgggtgtggccgtctagagctggggcacctgtctatgctgttagatgtggctgtgagtcctgatgaccgcttcatcctcactgccgaccgggacgagaagatccgagtcagctgggccgcggcgccccatagcatcgagtccttctgcttggggcacacagagtttgtgagccgtatctccgtggtgccaactcagcccgggctgcttctgtcctcctctggggacggcaccctgaggctctgggagtacaggagcggccgccagctgcactgctgtcacctggccagtctgcaggagctggtggacccccaggccccccagaagtttgccgcgtccaggattgcattctggtgccaggagaactgcgtggcgctcctgtgcgacggcactcctgtggtctacatcttccagctggacgcccgcagacagcagttggtgtacaggcagcagctggcgttccagcaccaagtgtgggacgtggctttcgaggagacccaggggctgtgggtgctccaggactgccaggaagcccccctggtgctctacaggcctgtgggcgaccagtggcagtctgttcctgagagcaccgtgttaaagaaagtctctggtgttcttcgtgggaactgggccatgctggaaggctctgccggcgcagacgccagcttcagcagtctctacaaggccacgttcgacaacgtgacctcctacctgaagaagaaagaggagagactgcagcagcagctagagaagaagcagcggcgccggagtcccccgcctgggcccgacgggcatgccaagaagatgagaccgggggaggcgacgctaagttgctgatcgtggcggtctgtttctgtcgactgtggaccacttatgtgcgatccgtggaccacttgcgtgcgatctgtcggccgacgatgagcttgttcggatgtagctccatcgtaagtcgaggagcatctgtgatttgtcctctgcttatgggatatgtttttccgctactgagtctgtgtagtaaatttttgactaggaaaaaaaaaaaaaaaaaa

SEQ ID NO: 860 - DNA, 3829 bp, Human
ggatcgcgtggagtgaaggtcctaccacggcgcgtgagtttcgctctgccttggattaagtctgcacttcccaggtccccggcgcttctgcccctgggacgtgggatccccacggacctggaaattctcgcctgtcttcccttcacccagagcaaattgagacgtcccggattgattcctaaagactcatgttatgtgaagaagcagctcagaagaggaaaggaaaggagccaggcatggctcttcctcagatatctcttccaaacgcatgatgaaggaggtcttgtcaacagggcaaggcaatacagaagtgatccacacagggacattgcaaagatatcaaagttatcacattggagatttttgcttccaggaaattgagaaagaaattcatgatattgagtttcagtgtcaagaagatgaaagaaatggccatgaagcacccatgacaaaaataaaaaagttgactggtagcacagaccaacatgatcacaggcatgctggaaacaagcctattaaagatcagcttggatcaagcttttattcacatctgcctgaactccacataattcagatcaaaggtaaaattggtaatcaatttgagaagtctaccagtgatgctccctcggtttcaacatcccaaagaatttctcctaggccccaaatccatatttctaataactatgggaataattccccgaattcttcactactcccacaaaaacaggaagtatacatgagagaaaaatctttccaatgtaatgagagtggcaaagcctttaattgtagctcactcttaaggaaacaccagataccccatttaggagacaaacaatataaatgtgatgtatgtggcaagctctttaatcacaagcaataccttacatgccatcgtagatgtcacactggagagaaaccttacaagtgtaatgagtgtggaaagtccttcagtcaggtatcatcccttacatgccatcgtagacttcacactgcagtaaaatctcacaagtgtaatgagtgtggcaagatctttggtcaaaattcagcccttgtaattcataaggcaattcatactggagaaaaaccttacaagtgtaatgaatgtgacaaagcttttaatcagcaatcaaaccttgcacgtcatcgtagaattcatactggagagaaaccttacaaatgtgaagaatgtgacaaagttttcagtcggaaatcaacccttgagtcacataagagaattcatactggagagaaaccatacaaatgtaaggtttgtgacacagctttcacatggaattctcagctggcaagacataaaagaattcacactggagagaaaacttacaagtgtaatgagtgtggcaagaccttcagtcacaagtcatcccttgtatgccatcatagacttcatggtggagagaaatcttacaaatgtaaggtctgtgacaaggcttttgcgtggaattcacacctggtaagacatactagaattcatagtggaggaaaaccttacaagtgtaatgaatgtgggaagacctttggtcaaaattcagatcttctaattcataagtcaattcatactggagagcaaccttacaaatatgaagaatgtgaaaaggttttcagttgtggatcaacccttgagacacataagataattcacaccggagagaaaccatacaaatgtaaggtttgtgacaaggcttttgcgtgtcattcctatctggcaaaacatactagaattcatagtggagagaaaccttacaagtgtaatgagtgcagcaagaccttccgtctgaggtcataccttgcaagccatcgcagagttcatagtggtgagaaaccttacaagtgtaatgagtgcagcaagaccttcagtcagaggtcataccttcattgccatcgtagacttcatagtggtgagaaaccttacaagtgtaatgagtgtggcaagaccttcagtcacaagccatcccttgttcaccatcgtagacttcatactggagagaaatcttacaaatgtacggtttgtgacaaggctttcgtgcgtaattcatacctggcaagacataccagaattcacactgcagagaaaccttacaagtgtaatgaatgtgggaaggcttttaatcaacaatcacaactttcacttcatcatagagttcatgctggggagaaactttacaaatgtgaaacatgtgacaaagttttcagtcgcaaatcacaccttaaaagacataggagaattcatcctggaaagaaaccatacaaatgtaaggtttgtgacaagacttttgggagtgattcacacctgaaacaacatactggacttcacactggagagaaaccttacaagtgtaatgagtgtggcaaagcctttagcaagcagtcaacacttattcaccatcaggcagttcatggtgtagggaaacttgactaatgtaatgattgtcacaaagtcttcagtaacgctacaaccattgcaaatcattggagaatctataatgaataaagatctaacaagtgtaataaatgtggcaaatttttcagacatcattcatacattgcagttcattgacacactcatactggagagaaaccttacaaatgtcatgactgtggcaaggtcttcagtcaagcttcatcctatgcaaaacataggagaattcatacaggagagaaacctcacatgtgtgatgattgtggcaaagcctttacttcatgttcacacctcattagacatcagagaatccctactggacagaaatcttacaaatgtcagaagtgtggcaaggtcttgagtccgaggtcactccttgcagaacatcagaaaattcatttttgagataactgttcccaatgcagtgagtatagcaaaccatcaagcattaattgacactagagtcagtccagcattgacttgagtttgtgttgacttaacattgagttcaacccttaattgacattcaagtgtttatgttaagaggattgggccaggtgtggtttctcacacctgtaattccagcacggttggaggccaaggcacataggtcacttgaggtcagaagtttgaaaccagcatggccaacagatgtcagccacttttcccagcctgttttttgattcttattttctatttttcttttttgagatagtactttttaaagagatagtacttttttgatatagtactttataaaagggagatcaggccgggcacggaggctcatgtaggtgatcccggcactttgggaggccgagacgggcccatggcagggtcaggagatcgagaccgtcctggctagcacggtgaggccccgtctctgctgaaaatatagaatattggccgggcgtggtggcgggtgcctgtggtcctagctgcttgggaggctgaggcgggagaatggtgtggatcctggagacggagcttgcagggagccggcatcgtgccactgcactccggcctgggcgacggtgagaatctgtctcaaagagaaaggaaaagaagggatatcaaagctggatggtggctcatccctgcaatcacaacactttggtagactgatgtgagtggatcacctaaggtcagaagttcaagagcaccctggctaacatggtgaaaccccatctctactaaaagtgcagaggttagccggggggtggtggtgtgcacctttggttccagctacttgggaggctgaggcacgggagtcgcttggacctgggaggtagaggttgccgtgaggcaagatcgtgccactgccctcagcctgggcagtagagtcagtctccatctcaaagaaaccagcaaacaaaaaaaaaaaaaaaaaaa

SEQ ID NO: 861 - DNA, 388 bp, Human
agattatttctctaacttactggtttatcttttgtagcttatttcaggtgatttgttgtgtttgtctatagagtaaaataacatgtctaatgagttataatttaatgtccttccattcaatcactgtatttcaaatttattccaatattttggaataagcttccaatattttaacttaaatagggaaggtcatacttggtattttcctgacctcagctggaatgccttcatagtgttcacatgaacacatttggcctgagagagacttattatgccgagaatgtgtgtaaccctttttacttaggaattgtgggtggagtttttccccccgcccaagaatgattgttaatttccgtccatcattttcctttgattgttcttcatctcg

SEQ ID NO: 862 - protein, 4 aa, Human
RLFL

SEQ ID NO: 863 - DNA, 5236 bp, Human
gttcttttcattccatcactttaggtgatgggtaagatttttgaaagccttatattttttgattttgttgtctagtttaatcctacctttaatagttgtgtttggtaaaattcccacttgaatgtgacactgataataattatgctgatttttagcatctcttataggaatcaaagtttattaaagttacatagaggattgaaaaatgtatatcactcaatttttatctaagaaggataggttataaagggaggtacctaaatactcaaataatgtatatattctttttcataacatatggaatgctttaagcaattgttttgaaaaaaatctgcgtatctttgacttaattggcacatgactttttcaagcagccattcattcagaggtttgttttctctcagtccttttgctacattcactttcttttcaaagaaatgttaattattacaaaaattgacatagatatctttcccaaacttggggtaaaacccatggttatgtggaacataactgttcttaaaaagtcaattataatttgtaactcacatcctttgagctaaactaaattaaaattacagtatttaataattctttgggcatttttaagaggtctgaatttgtatttttcttcatttttgaaactttacatttgttgactttttttcattctcatttaaaatatattgtgctatgataaccaaccttcttccaaggagtgaccattactgcctacatttgcgttgctttctacatagagacttgtataatagtattaatagtagctcattctctctaaaaatttactgcccactgataggatgttttgtttccttgataaaacaaatgtaaatgaggaattttatttgaattggaatattgtttttctagaggacattcatatctgcactattatctgatgacatgttggtaattttaaagactgcaaggcagtttagagaatgaagtaaaccaatagatactcttttgattctccaaagaaatataattttggtttttgttcctcagagagagtttgaaagaaattttcagatgttctgttccctatagagggcctattccaggatctaaatgaatgggaatttataattcctttcatagactcaaacctgaaagcagaaatttttagtagttgagttgctttaagtgaattttaacaaatatgacacagaaaaggtcagatgctgttgtataaaattttttactagtgtgtcttatataattctttcttctcattaattcagtgcctttttcctctaagcatactcttggtccatgccccatgcagtgtcaactgatgtttaagctacagagcattgttgtagtggtgagggccctctgttgcaggggcatggggaaatgcatatattaatcaggggctggaggagtatacatgattcttgtgttcatgttgtcatttgaaactcttcacataaaattttctaatattcatttggaaaacctctccactggagaggtttcatctctgagaggttttgtaataatagtgtaagttcagtaaatccagtccaaattctcatcacatgtattatttgatactaaattttcaattattacttcaaaataagagtctgaggatttcttcttactggcgttcttaaaggtctctaaaattaaagaacaagatgtggttttttgtttaagacgtttttagtttatttgttgttaagttaaactggagaaagtttgtcatcctcattttcaaactgaaaactaatcaaatatagtgcctatttagtctcaaaataaggtaactattaacttgattatactatataatattctcaattacatttgaatttaaaaatattgagctcttgattacaatttaatacattgtaaaaagtattaaatcctttgaaacatcttttgttgcttatttagtttttgtttctacaggtcaaacatgattgctttctataaaagaaatgcttgagaggttgactataatggatatgtcacaggtataaaacagttgttttctaaaaacatgcatttagtatggcattctcttttagcaactgaattcccaacgagttttattaagctggatatcgaaatgaaggagctgccttaagcactttagaaaaagaatttttttacaattcattttgactctcatggctgaccatgtcattatgtctttaaattttggtaaatatgtagataccaagcattaataactaatgcacacagaaatttaatatacagcaattctttgaatgttccaggtgtacgtaaactaactgaaagtattaaggacatgcctgtctatacatgggtttcattgatggtatctgtatcatcttgacaaatcgtgaactgctgctgtatggctagactttgcctatttactctgttatgcaaacagtaatttttccctatgttatgaagagagacatattggcttgctttaatttacttatttatgaaattaaagcatgaataatatgtataatttgaattttttgtgactgatccttggcagtataaatgataaaagtaaatgtaatggaatcttttaattaggctaagatatgctatttcataacttatgtagaatgatttttatctatatactttgtccataaaattataattgtttatgtaattttattgtttcttatggaaacaattggtaaagtatatggaaaatgattatttcaaagaatatttatttaaagagggaagtgtagacttcttactgtaaaatatgtgattccaggcttaagaaattgattatattttaaaataattatttttttaaaaatgtaatttgtttttaaaagatgagtctccattcattggctaatccatacagcaaatatttgagtgtttgtgatatggcagtaaaaatgtgattactttgtatgtacattaaccaaaaccagtgaagtttgatggactgtgcatagagttttgcagcttttgagtagtgtgacagagtttgcctcttaaaattgttttgctaataagtcagaagtttaaaatgtgttatagtttgctaaaaaaaaatcaaattaactgcatataaaatggttcacttttatatagtcacatgtaatgggcctgaaaaagtttcttctttgattatgtagttactctagatacattcttttagggaagtgtatggtcaacatatatttactcagtatacagataaccacaaagttgttatttttaaccaaaatatacatttcataatgttggcactggagtattataagagatcatgaatgtttccttaattatcatggcaagattacctcacgttcagtatagtttagttttgtgtgtatcttacagtatgcatgttctgaaattatttgtgatcctgatatgtcacatataatagctttgttacctggagtatttgattaacctaaacagtttaagcattttgaattagttggagtttaaatggattacatttggtgtatattgtcttcattgaaaagatattgttggatatgccacatcagagttagcattgacttataaataaataccagaatttaccagagtacacttttctcttcagatgactcaattattaaataaaagaatatttcttatttctgggtcaatataaggtactgacttctgatgcataatcacttaagctatgtgagtttaaactggtatcttttcttagtggtacccattcaatgtaagctggtccatgggaatggacatgaagaggatttcacagtatgtagagcagaaggcacgtgaatgtgtttgctttggcttggagcttattaagttttgactacggttaaaataagtcaaatagtaagtggtaaaacacatttttgttagtattggaactttctggagaacataagggctatgagaatgcatatatatattttttaacatttcctatatatctaaggtaccaaagcactgagtctaatttacctattaagggagactctttaaaatcaactttataactaattcatactataagacagataatagctaaagttttggaataatttatattaaaagccgcaagtcttaaaaatccctggatatgacataaaaaggattttggcttcttttttgaagtatttaaaattaatcaccttagctctaccatatactagatttgtgaccgctacacaaattgtttatcatctttgggtctctattgccttctttataaaataagtgtaagttgttcagcctgcctcacagggctgttgtgaggaaataaaatgaaatggagtatgtgaaattgcttcagcaacagcaaagtgctacgtaaatgtaaagtgttgtttttagctaataatggatttaagtgtttggataattgtagatgcatttactttgataaagcgtgtgcttaaagtggtatcaccagtgatttctaacatgattttaaaaaaataaaaccccaattaaaatgttctttaatattcatttaatttgtgcatgacttgtggcctttttgtattttctcaagcctattactctagagctgtaaaagctcttgcacagcattgttgtgtcagtgtagaatagtggcataaataaatgaattaagctacatttccatgcaggcatttgcactttgaagttagggctgcccagtgccacatgcaaagagtgtatttggtctaaacagttctttccaaacaaccaaatggctgggcagcttgttgtcacggataaatgatataaaatgtaaccactgaacatttgacaactttgttgcattatcatttttaaaaaaggatgaagcatttcaaaatcttgttaacctggttatctcttggtatctctcctgacatatttgttttgctttaaattggattaaatggtttacaggttatctgaatctacagatttagtatgtctattatctggacatgattttgctatgcagttgtgataataaaaattctaattcctcaggtttggccttttaagttatggctgaagacctttaatgatacttatgatgcactcagtgccatacaatagtgttttaagaagcacatggcctcattttccttagaaacaagacaaagcctttttaaaatgtttttttttcactttaaaatagggtattcaaagtggagtaacgtgtattttgaaatgattttgtgttctatatagaatgtcccagttaagattttacagaagcacctggaatatctcattaaaaatttaaaaactc

SEQ ID NO: 864 - DNA, 934 bp, Human
gtgagaggggctttcacaagataacattgtagaatcattcagtgagaacaaaagttgactcaagaaagcaagagtctggatttaaatccctggtaaaattgccttagtaagcaataataaaatttcccagcacatgactggggtaagtaatgaattgttgaaacctgcaaagagccctaaattataagaattatgggggatcggaggaggaaaataaatgaaaacagaagaccataaaagaatactttgcattcagtagaaaacctgtcagtactgtaggacaaaaaggaatagattctacattttacatcaccagtgatgcctcctcatggtttaaccatttcttccacattctgcctaaagggaaaactgtgtcagcaattgcttttggtttttaaagttataggttgctactacatggatgtgactaagaaaatacatagattatcttaaaatgggcatgatgtaaaagactcaatcagtagggtaactaaaaactttgtagtactctagctttggaaatctgagaggcctatatagttcatttgagtgtttgatcaaattcttattgagattacagcctgtgcaaaatatttgtgatgcatttttaagtttacttaagtacactttgaaattctttaaaaattttaaaatctttaaaaggacacaagagtgtaccacattgagattaaaatgtgtttattattaatttgtacataatactataacaaataattgttctcaggtatgtttaaggccttattttaaaagttgattcttcaatttctaatttaaaataagcttttagtttttctcaactatgtatatgtaatgattataaatgcctagagtagtgtttcccagacaactagaaccacacacaaattagtaccaccaaaaaaagtcgacgcggccgctaatttagtagtagtag

SEQ ID NO: 865 - protein, 9 aa, Human
ERGFHKITL

SEQ ID NO: 866 - DNA, 832 bp, Human
  unsure 4: unknown base
  unsure 5: unknown base
  unsure 6: unknown base
  unsure 47: unknown base
  unsure 51: unknown base
  unsure 83: unknown base
  unsure 429: unknown base
  unsure 432: unknown base
  unsure 433: unknown base
  unsure 507: unknown base
  unsure 509: unknown base
  unsure 511: unknown base
  unsure 512: unknown base
  unsure 513: unknown base
  unsure 514: unknown base
  unsure 515: unknown base
  unsure 517: unknown base
  unsure 518: unknown base
  unsure 519: unknown base
  unsure 520: unknown base
  unsure 523: unknown base
  unsure 525: unknown base
  unsure 526: unknown base
tggnnncgagcacagcagcatcctgggtcttacgtcggcagaagtanaaanggaagaagcctaaaggaagtgaaagtgttgcnggatctcctgctggcattgcctcctccttcacacagcatcccggttctccctgcagccacctgatcttccctttgtccccttcctcaccacagccccaccaccttcaccactccaagttgatgcttctcctacatctggccaagatgctactcagaggtggatgaaagcaaaagtcactgctctaatacaagaaaagtcccggttttaggtttcagaaacagaattttcccgaatgtttaaaatggtgaatggttccataaactgtgttaaccaggcttcttacaggctagtcccagaatctgaccaccatgtgcaatactgtttctaagaaaagtgtgctccaancannaaccttcaaacatttaacctgaatgaatgaatataacctcttcacggttcagtgttttcataagcaaaacaagngnannnnngnnnngangnnttttaaaaaaaatttagggctgggcgcggtggctcacgcctgtaatcccagcactttgggaggccaaggcaggcagatcactcctgaggtcaggagtttgagaccagtctggccaacaagatgaaaccctgtctctactaataatacaaaaaaattagctggaatgtggtggcacatgactgtaatcccagctactcaggaggctgaggcaggagaatcacttgaacccaggaagcagaggttgcagtgagccgagatcgagccactgcactccagcctgcgtgacaagagcaaaactccatctca

SEQ ID NO: 867 - DNA, 289 bp, Human
  unsure 70: unknown base
  unsure 133: unknown base
  unsure 184: unknown base
  unsure 185: unknown base
  unsure 186: unknown base
  unsure 187: unknown base
  unsure 191: unknown base
  unsure 200: unknown base
  unsure 212: unknown base
ttaaaatcctgctagtttgatgaagaagttgaatggaaagatttaactttgtaaaagtgtaagtgacatnagcgtaagccaaaaggaatttgaaacttaaagtatttctgaatgaatttcttaactcagtagnaaaaaacggaaggagtaaaagatatttgctgcatatatatattatatatannnncgtntatataatntatatatatatntgtagtgttttatcactgctcttaactgcctttgataatttctcataaaccattgctgccacctagttttggaaact

SEQ ID NO: 868 - DNA, 3678 bp, Human
ggttgaagaagtacgagaagaccaactggatagtaatttccagatgcaatcagaaaatttctgttcttatatcttcacccatgcaaagaccaagaccctgagagagggaatccttgtcactggaaaccggctggggatgctggtggagacctacctggatgccatcaacagtggagcgactccttgtctggagaatgcaatggcagttctggcccagtgtgagaactcagcagccgtgcagagggcagccaaccactacagccagcagatggcccagcaagtgagattccccacagacacactccaggagctgctggacgtgcatgcagtttgtgagagggaagccattgcagtcttcatggagtactccttcaaagataaaagccaggaatttcagaagaagcttgtggacaccatggagaaaaagaaggaagactttgtgctgcagaatgaagaggcatctgccaaatattgtcaggctgagcttaagcggctttcagagctcttgacagaaagtatttcaagaggaactttctttgttccgggggggcacaatatctacttagaagcaaaaaagaagattgaacaggactatacactagtgcccagaaaaggagttaaggtctctgacattgacagagcctggacgttggaggaagccccaggacgttggaggggtaaagtaaaagtccacagttaccgtgagagaaaaaagagggagaaagcagtgcagccaaactcggaagaaaagagaggaggaaaaggactcgactttcacattggaacaaccttctttccagtgctaaaggatctctgatctggggaacaacaccctggacatggctccagagatcaacttgccgggcccaatgagcctcattgataacactaaagggcagctggtggtgaatccagaagctctgaagatcctatctgcaattacgcagcctgtggtggtggtggcgattgtgggcctctatcgcacaggcaaatcctacctgatgaacaagctggctgggaagaaaaacggcttctctctaggctccacagtgaagtctcacaccaagggaatctggatgtggtgtgtgcctcatcccaagaagccagaacacaccctagttctgctcgacactgagggcctgggagatatagagaagggtgacaacgagaatgactcctggatctttgccttggccatcctcctgagcagcaccttcgtgtacaatagcatgggaaccatcaaccagcaggccatggaccaacttcactatgtgacagagctgacagatcgaatcaaggcaaactcctcacctggtaacaattctgtagacgactcagctgactttgtgagcttttttccagcatttgtgtggactctcagagatttcaccctggaactggaagtagatggagaacccatcactgctgatgactacttggagctttcgctaaagctaagaaaaggtactgataagaaaagtaaaagctttaatgatcctcggttgtgcatccgaaagttcttccccaagaggaagtgcttcgtcttcgattggcccgctcctaagaagtaccttgctcacctagagcagctaaaggaggaagagctgaaccctgatttcatagaacaagttgcagaattttgttcctacatcctcagccattccaatgtcaagactctttcaggtggcattgcagtcaatgggcctcgtctagagagcctggtgctgacctacgtcaatgccatcggcagtggggatctaccctgcatggagaacgcagtcctggccttggcccagatagagaactcagccgcagtggaaaaggctattgcccactatgaacagcagatgggccagaaggtgcagctgcccacggaaaccctccaggagctgctggacctgcacagggacagtgagagagaggccattgaagtcttcatgaagaactctttcaaggatgtggaccaaatgttccagaggaaattaggggcccagttggaagcaaggcgagatgacttttgtaagcagaattccaaagcatcatcagattgttgcatggctttacttcaggatatatttggccctttagaagaagatgtcaagcagggaacattttctaaaccaggaggttaccgtctctttactcagaagctgcaggagctgaagaataagtactaccaggtgccaaggaaggggatacaggccaaagaggtgctgaaaaaatatttggagtccaaggaggatgtggctgatgcacttctacagactgatcagtcactctcagaaaaggaaaaagcgattgaagtggaacgtataaaggctgaatctgcagaagctgcaaagaaaatgttggaggaaatacaaaagaagaatgaggagatgatggaacagaaagagaagagttatcaggaacatgtgaaacaattgactgagaagatggagagggacagggcccagttaatggcagagcaagagaagaccctcgctcttaaacttcaggaacaggaacgccttctcaaggagggattcgagaatgagagcaagagacttcaaaaagacatatgggatatccagatgagaagcaaatcattggagccaatatgtaacatactctaaaagtccaaggagcaaaatttgcctgtccagctccctctccccaagaaacaacatgaatgagcaacttcagagtgtcaaacaactgccattaaacttaactcaaaatcatgatgcatgcatttttgttgaaccataaagtttgcaaagtaaaggttgcacaccgatgctccagaattgtgagggagccatactctacagctattccaccgaggataatactaccattgtaaaggcatctcacgggaaaacaacacagctaccatgaaccagcaccatgatctctggatgaaatgctggaagcttctgcagtgtcagctatgagtaaatggatgccaccaccttcacattttcagtaaacaaatactcccctaccccatgaaaagttgcatctttgagctgctcacatctccagctaagcctcacaaaagtcaatctgcagggaagaatctaaatcatatgcctacccatgggaaagtctgagaattagagtatttttgtcttctacttttggaggaagaaactaataacgtgggaaattttcctgtatgtttagtcaaccagtttttccatgcagatgtatggagataaatcttatagtaggaataacctaagacttgagttagtatttttgtgtacatcagatacaacactcttctcatcttttttgtcattatttttcaatgttgttttaatctttccactgttgtttcatgtcatgcactttgttaatattctttaagttattcttagtttttaacaatgatacttaagaaagacttaataggactatagaataggtactccctattccccaaccctgggaacacaatataacatattagttcatttgtatttaagatctatcttgtttacgcctcagtttagttattgctcttacctttcaaacagttaatattttgtatctagttctgtgaaagcaaaaagcaactttattctttcttacaattccccttttacttaatcggaacatttctttcctgtttgttcattagtcactctcagataaatgaatagtctctttttccaaaaaaaaaaaaaaaaa

SEQ ID NO: 869 - DNA, 474 bp, Human
  unsure 100: unknown base
  unsure 111: unknown base
  unsure 126: unknown base
  unsure 127: unknown base
  unsure 142: unknown base
  unsure 228: unknown base
  unsure 253: unknown base
gaatccagccccttagggaaatgaatcataggcgaaggagtaaggagttgagggagacagagttagtggaactactgaaacaacctgtccaattaatttngacctccagantaggctctgagaagnngccacaactatcttncaactagactgaatccctgaggtcttgtctcctcatgttatctgctcctgaaggggtttggaaatctccagggtttttcaggtttntggagaaagactaggacaaccactnaccagcaactgccctggcacttggtagggctatgatggatttactgaacgttgaagcagaaagtgaaatgcaaaccaattttagtattgcatgccctatgttaatctctggtcagcactgagtgttcaaagacagtaggacgtcggttgctgacctgcctcttagaagctagtttaactcagcgggtaaggatctaggacttctacattagttaccactgt

SEQ ID NO: 870 - DNA, 488 bp, Human
  unsure 55: unknown base
  unsure 100: unknown base
  unsure 215: unknown base
  unsure 425: unknown base
  unsure 426: unknown base
  unsure 427: unknown base
  unsure 428: unknown base
  unsure 429: unknown base
  unsure 431: unknown base
  unsure 434: unknown base
ctacctgcaggccagaattcactccctcaagctgcaggctggggctgtgggcagnggtggtggattaccagaatgggttttacaaggttttctttacttngctatggccaggcaaagttaaagtatccgtatctctggtccaccccagtgaagggatcagagttcttcagcgcttacaggaagataaaccagacagggtctatttcaagagtctnttccgttcaggaagaatttctgaaactactgagtgcaacgtgtgtcttcctgggaatctgcccctgtgtaactttacagacctctacactggggagccctggttctgcttcaaaccaaagaagctcccttgcagcagcagaattacccatttcaaaggtggatacctgaaaggtctcctaaccgctgcagagagtgctttcttccagagnnnnntnaanaaggagatgctgtgtgtttgcttactgtagtagccctggattctaggacagtac

SEQ ID NO: 871 - DNA, 5194 bp, Human
cggccactggcacctactactgctctgtccactggccacactccacggtgagaggcagcggcaccttcatcctggtcagagacgcagggtaccgagagcccccgcagagtccacagaagctcctgctctttggcttcaccggcctcctgagtgtcctgagtgtagtgggcacggccctgctgctctggaacaagaagcggatgcggggtccagggaaggaccccaccaggaagtgcccagatccaagatctgccagcagccccaagcagcatccttcagaatctgtctacacagctctgcagcgccgcgagaccgaggtctatgcctgcatcgagaatgaggatggcagctcacccaccgccaagcagagccccctctcccaggagagaccgcatagattcgaagatgatggcgaacttaacctggtctatgaaaatctctaggatgggctccaccgctcatagagcttgccctgggtcagaggaccggggcagcccctgccaccaaaggacttgatctgagttgggagtaagggccccagggacaccccatcatttcaccctcacattcaaggcccttcctgtcttggccggccccactgcccccccattctatgccccaaccaccaaggctttcccatcttggggcctttgcccaggctgttccttctgccaggcaggcccttcctcccttggcccaaccagcaaagcgcccctcagtcttcaagggctttcctggatgccacccttgcccagagccctgctcactgcctcatgctgacagagcagcatgctctcttggcaccagcctgcacctcagccagtagggcagcctctgagctgagggaggaccctgcaggggcgcctagcagtgctgtgtggggagccgaggtatggaggagctggggagcagctatgcaaatccctacctacccagctgggccagaggcacgaggcagccaggcagggtgggagcaggggctggcgtgggaggtctgggggacagacaaggatgatggacccctcagaggcaagactaggatcagggacagatctggaggcccaggacatggctgagaggtggtcagcaggctgggggcatggagcagagagggcttgggtacaagctggagaggaaggagattctggcatgttggggtgagggcagagggacagatgaggggaggagggtgctggctaaacaggaactgaatgaatggcctgaagctccctctcccaagggttcccactcccattggcctggccctgtacgtgcactgtgtcatctccttggtcaccctctgctccaggccttctccaccacaggacctcagctgtccctccttctacccaaggtggagtcccccaaagtcccttctgtctggcctatcctgtgcccaccacctgtggcttcatccagccctcctcctctatctttatctgccataggccgcagccctggccccctgtggattgaggtcccaagtggtccagctgtggggtttggtgctgggaccctcaatggcagccggaaggtccctctgaggcagaagctcaagccccatggggacagtggctccccagtgcctggccctgagccatttctgctgtttcaggtgcccacatcaccctcatttcctcctcgcagtagccctgcaccgtggccagaaacccatccacaggcaggcagtggctggggtccgggtgccccgggctgttgggctctgcttcctccctctgctcccccatgtctccctgagttctcccacctttgctcatttgtaaaatgggcaggtcaatcttcccaccccaccgtgtgggctgccccaaccccaaatgtgcccagggaggggggggatcccaaggcacaggccccgcccctgcccccaagcagcactgggctactggctcgcagaagcacctttggttctgcaggtcatgcccctccctgcagggaggggaaagctggtggtggaggctgggcacggactgacgtccagaggaggtcccttggccctgctagggtggcaccggacttctctggtcccgcgggacggccggtggcctcccggcttggttctgggcccccgcctgcgggcgcacgtggcagggagggctttagcgggctcgcatagccgagtggcaaggcccctgctcccagaggctggatttgaatgaactccgggcctgtttggggaggtgaagctgccaggtgtgcacaggggcctcccaggctcctggctccaccagccaaggaggtgggggcaagggtcagggcaatgggggacaatgccgctcagggtgcagtgagctcccctgggaaaaccgaagccagcaagaccaggagagggccacctcactgggcctgcctcccccacctcctgggcctctctgacctcagctcctagaccctggacccttggctgggactcagcattttccagtctttttcaggggtagacaggggagcctgggttaaactttaccactgtgccctggcccaggcatcaccaacacggcctccctgcagctgccctgccaccgacagaccccgattaaacccacacctggccttggcctcccctgctctatgccttgcatggtttttgcctcacttggaataaaattccaactcctccctgtggcgtaggaggttcttgggggctgacccatcacccctctggtggacagagacattgccagcgtggtggtcgtctgtgcttggttcagggcaaggctgggaggcagtgggtgctgaggtcttcagtgagcagggagagaggcagggaggaggaggaggaggaggagagcacagcatgaagggacgggaccctgaggggctttggcccaagggagggtggggcaagaatgttctgagacttctgtgggcagcaaagaggactgagcacctgttctccagcccccaggactgagagcctgcagagacaggctggcacagggcgaggggtggcagggaacttcagggtgggaggtgcatggggcaggcgggaggaggaagaacagagaggggacagagagggtatgaatgggagctcctggggtgcaggcttgctttccactatgaatgggtggaggagggaagagaagaaaattgcttttgagacccacccaggctgggtggcctcagggcctcccttgaatccctgctccacctcccacagccttgtggacttgggcaagtcactggccacctgagcctcagtttgcagtgacagtcaagacagctcaggccaggcgtagtggcttatgcctgtaatcccagcacgttgggaggccgaggcgggtggatcacttgaggccaggagtttgagaccagcctggccaacgtggtgaaaccccgtctctactaaaaatacaaaaattagcctggtgtggtggcgcgcacctgtagtcccagctactcgagaggctaaggcaggagaatctcttgaacctgggagacagaggttgcagtgagccgaagtggcaccactacacaccagcctgggctacagagcacgctctgtccaaacaaacaaacaaacaaacactactcagtgtctcagaaaggacagaaggggactccctggctcaggcagaagctcagtgggtgtgcatttccttcaagactcgtccttcagaagaaataggcttctggggcagtacagaggagtcgaagtgagaggcaggcctccctgggagctgggcccaggctctctgcagccatgcctttaaggagtgcctgcggggtagcacgatcagatggacaggccagggctgcccagagctgggggtgggagcaaggtaagcagagaggtgagggaaggagggtgctggcttagcaggagctgaatgaatgggcctggaggggaaaagctaagggggatggggtggtttgagtggagtaggtgaggcccaggtgaaggggagctgtggaccttccaggacagacggatgtgagcagtcctgagtggggactggagttagggcggggaagggaagccccaggcagcccctgcaggcccctgcccctgggccctaccgcagcagggcagccctgtctctgggtctcagctgatgcttccctctgcccactggcccctgacctggtgggatttcccaccatctctcccggcccagcctgccctgccctcctaggtcttcccaacctcccctctgcagaaacatctcagccatgtctggcacccccaggcatccctgcctgcctctaggaagttgaccccttcaatgggtttcagcctccaaccccacccccgcttgactcctgctctgtcagcacttgcttgagaaaatcatcctgggaaaccagcttctgggagcgggggccttgccgctcggttctgcgggcctgctgaagccctccttgccacgtgtgcttgcaggcgggggcccagagctaggctgggaggccactggctgtcctgtggggccggggaggtctggtgccaccctagcagagggcccatggacttcttctggaggtcggtctgtgcccagcctctaccaccagtccagaacttgcagtgggtgcggtaaacggtggcccctcctcagcaaacatttccaggggattctggcagcagagtttccatgggaacatgtgctggttctgcgctgaacccggtgtggctggggttcccttcacagccaatattgcaggaactgagcctggtggcctcggccagggtaggcagtgctctttggccacccagtgtcacaaacctgaactcaagttacaggcaaaacctgcttttcctttttctttctctctctctctctttttttttttgttaaagcacattctaatgtaaagtccatgctccattctaaagatgcctctgggatttcagggatggatttttatgtagttcaatagttttcttggcagacagcttatgcaggagaggtgggccgttggctcagtccagccaggctgagtggcgtcactccattccttgcaatgccaggggatgtcatttgcccacctgagggggcttccccggtctcccttccctgacctgtggtcagaatgatggcctcagccttgactgagcgcgggtcaggccagactctctgaacttggtgttggcgtgtgttttgtgtgtgtctggaggtgacatatgtgggtgacagaagcatatgttacagtgaaacattaaaactacagcaaagtg

SEQ ID NO: 872 - DNA, 417 bp, Human
  unsure 406: unknown base
ctaaaattaggagctctgttctcagactgcctgggtctgaatcctagatccaccagtggtctggttaactcaaagaattatttaacctctctaagctataatttcctcatatgtgaaacaaggataaaaagagtgtctgttttatagggttgtgaagattgaaattatcaaatatggtgcttggaattgggtagagacactcaatatatggtagttggtagcattgtaggaagtgaatagtaatagtcattttccattaatttatttacatgctttatcttgtgtaattgttaaaaaatatcaaatgcgttcctatgtgtcaaaaggcctaaatagccctgtgtacctaaaagatggtaattaattttggtggttggtttgggtgaaaatatctgtcactatttcnggaaaaaaaaa

SEQ ID NO: 873 - DNA, 626 bp, Human
ccccatctcccaccccatcttttgctacagccagggttagctcagcaggtgaaaaccccgagggtgggtgaaacccctctggggctcagacatgcaaaccttgggcatctctctgtcccagctggccccgccagccggtaggaagtttcccctgagttctcagttttttcttctgaaaaatgaggggttgtatgcaaggttctcctcctggcctgtggtccccagagaagggcaggaaggaaccttagataattctcatatgcatttaacagacgaggaaactgagacccagagccgtcacatcaatacctcatttgatcttcataagagcacctggaggaggggggtggggtgtttgtgtttgtttaaatttttttttgtgaaaaaaatgaagataggcattttgtagacaatctggaagttctggaccggaatccatgatgtagtcagggaagaaatgacccgtgtccagtaaccccaggcctcgagtgtgtggtgtatttttctacataattgtaatcattctatacatacaaattcatgtcttgaccatcatattaatatttggtaagtttctctctctttagagactccacaataaagttttcaacatggtaaggttttcc

SEQ ID NO: 874 - DNA, 325 bp, Human
  unsure 29: unknown base
  unsure 31: unknown base
  unsure 32: unknown base
  unsure 96: unknown base
  unsure 109: unknown base
  unsure 111: unknown base
  unsure 113: unknown base
  unsure 124: unknown base
  unsure 125: unknown base
  unsure 126: unknown base
gaaagctgttaaaatctttcctatttttntnngactcaactttccattccctgaaatcactcacaagctgagtttgttaataggctctcaatattntatttcttatatncngnccttgtttttnnnatttcttaaggtgattttaataataattaattgtatatgttttactgtactagacttagtaaaacataagaaagacgtataacatagttgaacaactttaagttgctctaagaagtttcctatgtgaggctgggtgccatggctcacgcttataatcccagcactttgggagaccgagatgggcgtatcacttgagatc

SEQ ID NO: 875 - DNA, 312 bp, Human
  unsure 211: unknown base
gtcaaatctgactgctacagttggtattaattaatgtcttctttaaaggaacatttatcaaataaacacatctcagataaaaacagttgttctcccatggtgtatgtatcttcatgtttgtccttagtggttataataatctgtataaattatgaagagaatctgctggaatgattagtaaggtgctttatttgtgggccaaatagtagcnggtattagatacgttggtgggccaagaaatgaagggaagccaagaatggagtgatacatcttacaaaagagaccaaatttcatacccgatgacatcaaatt

SEQ ID NO: 876 - DNA, 314 bp, Human
  unsure 140: unknown base
  unsure 289: unknown base
aacctcacctgtcactttttaattgcaagaaagctgaaaggtttttttctattatatcagttataatgagaaatactgtatatactaactatgagtaaaatactatattgcctaacttgtattattaagcaattctgctnaacctgtgaccttacattttcatctgaaaagcaggggctggacaccaattgccctatgaagctattgctagtcctaacattctttgttttgtttgcttttttggcacacttaagtgtgtactatgaagtttatgatgctttaatgaaantttctgtctctaccattgtaatgag

SEQ ID NO: 877 - DNA, 302 bp, Human
  unsure 80: unknown base
  unsure 82: unknown base
  unsure 85: unknown base
  unsure 255: unknown base
  unsure 256: unknown base
  unsure 257: unknown base
  unsure 258: unknown base
gtaatgtgaatcagtgcctgaggacctttgctgtgtccttggtacagaaccatccacttgacctaactacctcccctggncncgntctcgctcttctcttctttgttaagccaacaactatcaccctctcctactcttcttctccctgccccctggagggcactgtgtttggttgtgcaaatgtatttactatgcgtgtttccagcagttggcattaaagtgcctttttctaataaaatcagtttattatgacannnnaaaaaaaaaaaaaaaaaaaaaagcagccgctgaattctagacct

SEQ ID NO: 878 - DNA, 145 bp, Human
  unsure 57: unknown base
  unsure 58: unknown base
  unsure 59: unknown base
  unsure 60: unknown base
  unsure 61: unknown base
  unsure 62: unknown base
  unsure 63: unknown base
  unsure 64: unknown base
  unsure 65: unknown base
  unsure 66: unknown base
  unsure 67: unknown base
  unsure 68: unknown base
  unsure 69: unknown base
  unsure 70: unknown base
  unsure 71: unknown base
  unsure 72: unknown base
  unsure 73: unknown base
  unsure 74: unknown base
  unsure 75: unknown base
  unsure 76: unknown base
  unsure 77: unknown base
  unsure 78: unknown base
  unsure 79: unknown base
  unsure 80: unknown base
  unsure 81: unknown base
  unsure 82: unknown base
gcaccgagcccaagtgcccatatgaacctctctgccctagccgagggacaaactgtnnnnnnnnnnnnnnnnnnnnnnnnnnagagtatgaagtggaatgaatgctcctgttctgagaagcacacttgtaactgcatcttttgga

SEQ ID NO: 879 - DNA, 532 bp, Human
  unsure 32: unknown base
  unsure 37: unknown base
  unsure 46: unknown base
  unsure 52: unknown base
  unsure 54: unknown base
  unsure 61: unknown base
  unsure 62: unknown base
  unsure 63: unknown base
  unsure 64: unknown base
  unsure 65: unknown base
  unsure 66: unknown base
  unsure 67: unknown base
  unsure 68: unknown base
  unsure 69: unknown base
  unsure 70: unknown base
  unsure 71: unknown base
  unsure 72: unknown base
  unsure 73: unknown base
  unsure 74: unknown base
  unsure 75: unknown base
  unsure 76: unknown base
  unsure 77: unknown base
  unsure 78: unknown base
  unsure 79: unknown base
  unsure 80: unknown base
  unsure 81: unknown base
  unsure 82: unknown base
  unsure 83: unknown base
  unsure 84: unknown base
  unsure 87: unknown base
  unsure 88: unknown base
  unsure 90: unknown base
  unsure 93: unknown base
  unsure 94: unknown base
  unsure 98: unknown base
  unsure 107: unknown base
  unsure 113: unknown base
  unsure 114: unknown base
  unsure 115: unknown base
  unsure 116: unknown base
  unsure 117: unknown base
  unsure 118: unknown base
  unsure 119: unknown base
  unsure 120: unknown base
  unsure 121: unknown base
  unsure 122: unknown base
  unsure 123: unknown base
  unsure 124: unknown base
  unsure 125: unknown base
  unsure 126: unknown base
  unsure 127: unknown base
  unsure 128: unknown base
  unsure 129: unknown base
  unsure 130: unknown base
  unsure 131: unknown base
  unsure 132: unknown base
  unsure 134: unknown base
  unsure 135: unknown base
  unsure 136: unknown base
  unsure 137: unknown base
  unsure 138: unknown base
  unsure 143: unknown base
  unsure 181: unknown base
cctcctgctctggtgcctgccgggggcctggnccctngtgggggtnggggancncttttgnnnnnnnnnnnnnnnnnnnnnnnnctnnanaanncccntggggcccnagagannnnnnnnnnnnnnnnnnnncnnnnnagctnagagggactggtgggggccctgatgcacgtgatgcagnaagagaagcagagccatccactcctccgacgaaggggaggaccaggctggcgatgaagatgaagatgatgaatgggatgactgagtggctgagttacttgctgccctgtgctcctccccgcaggacatggctccccctccacctgctctgtgcccaccctccactctcctcttccaggcccccaaccccccatttcttccccaccaacccctccaatgctgttatccctgcctggtcctcacactcacccaacaatcccaaggccctttttatacaaaaattctcagttctcttcactcaaggatttttaaagaaaaataaaagaattgtctttctgtctctctataaaaa

SEQ ID NO: 880 - DNA, 2488 bp, Human
cggcccaacgaggcgctggtggtttcagggggctgttgtggttccgactataaacagtacgtgtttggcggctgggcctgggcctggtggtgtatctccgacactcagaggatttccctagagattatgacgttgcagccccgctgcgaggacgtagagacggccgagggggtagctttaactgtgacgggtgtcgcccaggtgaagatcatgacggagaaggaactcctggccgtggcttgtgagcagtttctgggtaagaatgtgcaggacatcaaaaacgtcgtcctgcagaccctggagggacatctgcgctccatcctcgggaccctgacagtggagcagatttatcaggaccgggaccagtttgccaagctggtgcgggaggtggcagcccctgatgttggccgcatgggcattgagatcctcagcttcaccatcaaggacgtgtatgacaaagtggactatctgagctccctgggcaagacgcagactgccgtggtgcagagagatgctgacattggcgtggccgaggctgaacgggacgcaggcatccgggaagctgagtgcaagaaggagatgctggatgtgaagttcatggcagacaccaagattgctgactctaagcgagccttcgagctgcaaaagtcagccttcagtgaggaggttaacatcaagacagctgaggcccagttggcctatgagctgcagggggcccgtgaacagcagaagatccggcaggaagagattgagattgaggttgtgcagcgcaagaaacagattgccgtggaggcacaggagatcctgcgtacggacaaggagctcatcgctacagtgcgccggcctgccgaggccgaggcccaccgcatccagcagattgccgagggtgaaaaggtgaagcaggtcctcttggcacaggcagaggctgagaagatccgcaaaatcggggaggcggaagcggcagtcatcgaggcgatgggcaaggcagaggctgagcggatgaagctcaaggcagaagcctaccagaaatacggggatgcagccaagatggccttggtgctagaggccctgccccagattgctgccaaaatcgctgccccacttaccaaggtcgatgagattgtggtcctcagtggagacaacagtaaggtcacatcagaagtgaaccgactgctggccgagctgcctgcctctgtgcatgccctcacaggcgtggacctgtctaagatacccctgatcaagaaggccactggtgtgcaggtgtgaggctcctacaggcccactctcttcagcagccacccggccctccctccagcacccgttttaatcccacagaacaacgggaacgttactgactctggtgccttatctcgaagggaccagaagtgctgcgtgttcaggccatctctggctgtcttcctgtctctcctgtctgtccacctcctcctcttcctctcctttaccccactttcactgccactttcatcaggtttgtgtctcatctccctgcgtgtcttttcctttgtctgtctttttctttcccccatgcacatcatgtagattaagctgaagatgtttattacaatcactctctgtggggggtggccctgctgctcctcagaatcctggtgccttgaagttctctgtgcatctgtccatcctccctatggccctggccagagctcagcatgggcaggggttctgggtaggacggtcactgtcctctctcctggactggtcttcccagccctaaaccctgccccaggaagcccacagcctcacctgctgctgcccctctaggtctgggcagccatgacctgcagggcccagagacactgtccttcccctcatccacccaaggccccagccagcgctcataccctgtcctttctccctgaccccaagggcacagaggcaaggcctcctgtctacagcagcttcctcagtttcctactgccttaggaggcccctgcttgtgctcagggaaggcctcttcatgggcatgttcctgctggggcggtgcggtttggtcccaactctgctaagttttctgagatgagggtctagccctgttggggacagaaaagtgtgtagaccttcttcctgctagggctgcactgtcctgggtgttgggcccttctggtggacaaggctgtgccaaccctgtacagaatcgagtgctgtagcctggccagaccccagagcccttgtgccatctttcttcctggccagagtgatggggttccagccatggggaagcaacccaatcctctgtctccttgctccaatggaggcagaagagcccaggacccaagcgtcttggcaggggtgctgtgaatgtccagtggtcccagctccccaccctggccctgccccagcctgtgtagctcttcctgcatgtggatgctgcatgtctggtctggggcttggatgttgcactgccccactgcctgtcccttctggtaaaataaagaactcttaatgcccg

SEQ ID NO: 881 - protein, 379 aa, Human
MTLQPRCEDVETAEGVALTVTGVAQVKIMTEKELLAVACEQFLGKNVQDIKNVVLQTLEGHLRSILGTLTVEQIYQDRDQFAKLVREVAAPDVGRMGIEILSFTIKDVYDKVDYLSSLGKTQTAVVQRDADIGVAEAERDAGIREAECKKEMLDVKFMADTKIADSKRAFELQKSAFSEEVNIKTAEAQLAYELQGAREQQKIRQEEIEIEVVQRKKQIAVEAQEILRTDKELIATVRRPAEAEAHRIQQIAEGEKVKQVLLAQAEAEKIRKIGEAEAAVIEAMGKAEAERMKLKAEAYQKYGDAAKMALVLEALPQIAAKIAAPLTKVDEIVVLSGDNSKVTSEVNRLLAELPASVHALTGVDLSKIPLIKKATGVQV

SEQ ID NO: 882 - DNA, 1319 bp, Human
cgcgcccgtcccgtcgccgccgccgccgccgcagacccctcggtcttgctatgtcgagctcacccgtgaagcgtcagaggatggagtccgcgctggaccagctcaagcagttcaccaccgtggtggccgacacgggcgacttccacgccatcgacgagtacaagccccaggatgctaccaccaacccgtccctgatcctggccgcagcacagatgcccgcttaccaggagctggtggaggaggcgattgcctatggccggaagctgggcgggtcacaagaggaccagattaaaaatgctattgataaactttttgtgttgtttggagcagaaatactaaagaagattccgggccgagtatccacagaagtagacgcaaggctctcctttgataaagatgcgatggtggccagagccaggcggctcatcgagctctacaaggaagctgggatcagcaaggaccgaattcttataaagctgtcatcaacctgggaaggaattcaggctggaaaggagctcgaggagcagcacggcatccactgcaacatgacgttactcttctccttcgcccaggctgtggcctgtgccgaggcgggtgtgaccctcatctccccatttgttgggcgcatccttgattggcatgtggcaaacaccgacaagaaatcctatgagcccctggaagaccctggggtaaagagtgtcactaaaatctacaactactacaagaagtttagctacaaaaccattgtcatgggcgcctccttccgcaacacgggcgagatcaaagcactggccggctgtgacttcctcaccatctcacccaagctcctgggagagctgctgcaggacaacgccaagctggtgcctgtgctctcagccaaggcggcccaagccagtgacctggaaaaaatccacctggatgagaagtctttccgttggttgcacaacgaggaccagatggctgtggagaagctctctgacgggatccgcaagtttgccgctgatgcagtgaagctggagcggatgctgacagaacgaatgttcaatgcagagaatggaaagtagcgcatccctgaggctggactccagatctgcaccgccggccagctgggatctgactgcacgtggcttctgatgaatcttgcgttttttacaaattggagcagggacagatcatagatttctgattttatgtaaaattttgcctaatacattaaagcagtcacttttcctgtgctgtttcaaaaaaaaaaaaaaaaaaaaaaaaaaaaaaaaaaaaaaaaaaaaaaaaaaaaaaaaaaaaaaaaaaaaaaaaaaaaa

SEQ ID NO: 883 - protein, 337 aa, Human
MSSSPVKRQRMESALDQLKQFTTVVADTGDFHAIDEYKPQDATTNPSLILAAAQMPAYQELVEEAIAYGRKLGGSQEDQIKNAIDKLFVLFGAEILKKIPGRVSTEVDARLSFDKDAMVARARRLIELYKEAGISKDRILIKLSSTWEGIQAGKELEEQHGIHCNMTLLFSFAQAVACAEAGVTLISPFVGRILDWHVANTDKKSYEPLEDPGVKSVTKIYNYYKKFSYKTIVMGASFRNTGEIKALAGCDFLTISPKLLGELLQDNAKLVPVLSAKAAQASDLEKIHLDEKSFRWLHNEDQMAVEKLSDGIRKFAADAVKLERMLTERMFNAENGK

SEQ ID NO: 884 - DNA, 5077 bp, Human
gcggccgcggagtatcctggagctgcagacagtgcgggcctgcgcccagtcccggctgtcctcgccgcgacccctcctcagccctgggcgcgcgcacgctggggccccgcggggctggccgcctagcgagcctgccggtcgaccccagccagcgcagcgacggggcgctgcctggcccaggcgcacacggaagtgcgcttctctgaagtagctttggaaagtagagaagaaaatccagtttgcttcttggagaacactggacagctgaataaatgcagtatctaaatataaaagaggactgcaatgccatggctttctgtgctaaaatgaggagctccaagaagactgaggtgaacctggaggcccctgagccaggggtggaagtgatcttctatctgtcggacagggagcccctccggctgggcagtggagagtacacagcagaggaactgtgcatcagggctgcacaggcatgccgtatctctcctctttgtcacaacctctttgccctgtatgacgagaacaccaagctctggtatgctccaaatcgcaccatcaccgttgatgacaagatgtccctccggctccactaccggatgaggttctatttcaccaattggcatggaaccaacgacaatgagcagtcagtgtggcgtcattctccaaagaagcagaaaaatggctacgagaaaaaaaagattccagatgcaacccctctccttgatgccagctcactggagtatctgtttgctcagggacagtatgatttggtgaaatgcctggctcctattcgagaccccaagaccgagcaggatggacatgatattgagaacgagtgtctagggatggctgtcctggccatctcacactatgccatgatgaagaagatgcagttgccagaactgcccaaggacatcagctacaagcgatatattccagaaacattgaataagtccatcagacagaggaaccttctcaccaggatgcggataaataatgttttcaaggatttcctaaaggaatttaacaacaagaccatttgtgacagcagcgtgtccacgcatgacctgaaggtgaaatacttggctaccttggaaactttgacaaaacattacggtgctgaaatatttgagacttccatgttactgatttcatcagaaaatgagatgaattggtttcattcgaatgacggtggaaacgttctctactacgaagtgatggtgactgggaatcttggaatccagtggaggcataaaccaaatgttgtttctgttgaaaaggaaaaaaataaactgaagcggaaaaaactggaaaataaacacaagaaggatgaggagaaaaacaagatccgggaagagtggaacaatttttcttacttccctgaaatcactcacattgtaataaaggagtctgtggtcagcattaacaagcaggacaacaagaaaatggaactgaagctctcttcccacgaggaggccttgtcctttgtgtccctggtagatggctacttccggctcacagcagatgcccatcattacctctgcaccgacgtggcccccccgttgatcgtccacaacatacagaatggctgtcatggtccaatctgtacagaatacgccatcaataaattgcggcaagaaggaagcgaggaggggatgtacgtgctgaggtggagctgcaccgactttgacaacatcctcatgaccgtcacctgctttgagaagtctgagcaggtgcagggtgcccagaagcagttcaagaactttcagatcgaggtgcagaagggccgctacagtctgcacggttcggaccgcagcttccccagcttgggagacctcatgagccacctcaagaagcagatcctgcgcacggataacatcagcttcatgctaaaacgctgctgccagcccaagccccgagaaatctccaacctgctggtggctactaagaaagcccaggagtggcagcccgtctaccccatgagccagctgagtttcgatcggatcctcaagaaggatctggtgcagggcgagcaccttgggagaggcacgagaacacacatctattctgggaccctgatggattacaaggatgacgaaggaacttctgaagagaagaagataaaagtgatcctcaaagtcttagaccccagccacagggatatttccctggccttcttcgaggcagccagcatgatgagacaggtctcccacaaacacatcgtgtacctctatggcgtctgtgtccgtgacgtggagaatatcatggtggaagagtttgtggaagggggtcctctggatctcttcatgcaccggaaaagcgatgtccttaccacaccatggaaattcaaagttgccaaacagctggccagtgccctgagctacttggaggataaagacctggtccatggaaatgtgtgtactaaaaacctcctcctggcccgtgagggcatcgacagtgagtgtggcccattcatcaagctcagtgaccccggcatccccattacggtgctgtctaggcaagaatgcattgaacgaatcccatggattgctcctgagtgtgttgaggactccaagaacctgagtgtggctgctgacaagtggagctttggaaccacgctctgggaaatctgctacaatggcgagatccccttgaaagacaagacgctgattgagaaagagagattctatgaaagccggtgcaggccagtgacaccatcatgtaaggagctggctgacctcatgacccgctgcatgaactatgaccccaatcagaggcctttcttccgagccatcatgagagacattaataagcttgaagagcagaatccagatattgtttcagaaaaaaaaccagcaactgaagtggaccccacacattttgaaaagcgcttcctaaagaggatccgtgacttgggagagggccactttgggaaggttgagctctgcaggtatgaccccgaaggggacaatacaggggagcaggtggctgttaaatctctgaagcctgagagtggaggtaaccacatagctgatctgaaaaaggaaatcgagatcttaaggaacctctatcatgagaacattgtgaagtacaaaggaatctgcacagaagacggaggaaatggtattaagctcatcatggaatttctgccttcgggaagccttaaggaatatcttccaaagaataagaacaaaataaacctcaaacagcagctaaaatatgccgttcagatttgtaaggggatggactatttgggttctcggcaatacgttcaccgggacttggcagcaagaaatgtccttgttgagagtgaacaccaagtgaaaattggagacttcggtttaaccaaagcaattgaaaccgataaggagtattacaccgtcaaggatgaccgggacagccctgtgttttggtatgctccagaatgtttaatgcaatctaaattttatattgcctctgacgtctggtcttttggagtcactctgcatgagctgctgacttactgtgattcagattctagtcccatggctttgttcctgaaaatgataggcccaacccatggccagatgacagtcacaagacttgtgaatacgttaaaagaaggaaaacgcctgccgtgcccacctaactgtccagatgaggtttatcaacttatgaggaaatgctgggaattccaaccatccaatcggacaagctttcagaaccttattgaaggatttgaagcacttttaaaataagaagcatgaataacatttaaattccacagattatcaagtccttctcctgcaacaaatgcccaagtcattttttaaaaatttctaatgaaagaagtttgtgttctgtccaaaaagtcactgaactcatacttcagtacatatacatgtataaggcacactgtagtgcttaatatgtgtaaggacttcctctttaaatttggtaccagtaacttagtgacacataatgacaaccaaaatatttgaaagcacttaagcactcctccttgtggaaagaatataccaccatttcatctggctagttcaccatcacaactgcattaccaaaaggggatttttgaaaacgaggagttgaccaaaataatatctgaagatgattgcttttccctgctgccagctgatctgaaatgttttgctggcacattaatcatagataaagaaagattgatggacttagccctcaaatttcagtatctatacagtactagaccatgcattcttaaaatattagataccaggtagtatatattgtttctgtacaaaaatgactgtattctctcaccagtaggacttaaactttgtttctccagtggcttagctcctgttcctttgggtgatcactagcacccatttttgagaaagctggttctacatggggggatagctgtggaatagataatttgctgcatgttaattaattctcaagaactaagcctgtgccagtgctttcctaagcagtatacctttaatcagaactcattcccagaacctggatgctattacacatgcttttaagaaacgtcaatgtatatccttttataactctaccactttggggcaagctattccagcactggttttgaatgctgtatgcaaccagtctgaataccacatacgctgcactgttcttagagggtttccatacttaccaccgatctacaagggttgatccctgtttttaccatcaatcatcaccctgtggtgcaacacttgaaagacccggctagaggcactatggacttcaggatccactagacagttttcagtttgcttggaggtagctgggtaatcaaaaatgtttagtcattgattcaatgtgaacgattacggtctttatgaccaagagtctgaaaatctttttgttatgctgtttagtattcgttggatattgttacttttcacctgttgagcccaaattcaggattggttcagtggcagcaatgaagttgccatttaaatttgttcatagcctacatcaccaaggtctctgtgtcaaacctgtggccactctatatgcactttgtttactctttatacaaataaatatactaaagactttacat

SEQ ID NO: 885 - DNA, 6614 bp, Human
ctgcgcgccgctggcgctgaggggaggaagtttgctgtcgagcggcctgggttccgtgggcaaggccgtgggaggcagcgttggctgcttcgacacactgagggcggcgcgatgggagacgagatggatgccatgattcccgagcgggagatgaaggattttcagtttagagcgctaaagaaggtgagaatctttgactcccctgaggaattgcccaaggaacgctcgagtctgcttgctgtgtccaacaaatatggtctggtcttcgctggtggagccagtggcttgcagatttttcctactaaaaatcttcttattcaaaataaacccggagatgatcccaacaaaatagttgataaagtccaaggcttgctagttcctatgaaattcccaatccatcacctggccttgagctgtgataacctcacactctctgcgtgcatgatgtccagtgaatatggttccattattgctttttttgatgttcgcacattctcaaatgaggctaaacagcaaaaacgcccatttgcctatcataagcttttgaaagatgcaggaggcatggtgattgatatgaagtggaaccccactgtcccctccatggtggcagtttgtctggctgatggtagtattgctgtcctgcaagtcacggaaacagtgaaagtatgtgcaactcttccttccacggtagcagtaacctctgtgtgctggagccccaaaggaaagcagctggcagtgggaaaacagaatggaactgtggtccagtatcttcctactttgcaggaaaaaaaagtcattccttgtcctccgttttatgagtcagatcatcctgtcagagttctggatgtgctgtggattggtacctacgtcttcgccatagtgtatgctgctgcagatgggaccctggaaacgtctccagatgtggtgatggctctactaccgaaaaaagaagaaaagcacccagagatatttgtgaactttatggagccctgttatggcagctgcacggagagacagcatcattactacctcagttacattgaggaatgggatttagtgctggcagcatctgcggcttcaacagaagttagtatccttgctcgacaaagtgatcagattaattgggaatcttggctactggaggattctagtcgagctgaattgcctgtgacagacaagagtgatgactccttgcccatgggagttgtcgtagactatacaaaccaagtggaaatcaccatcagtgatgaaaagactcttcctcctgctccagttctcatgttactttcaacagatggtgtgctttgtccattttatatgattaatcaaaatcctggggttaagtctctcatcaaaacaccagagcgactttcattagaaggagagcgacagcccaagtcaccaggaagtactcccactaccccaacctcctctcaagccccacagaaactggatgcttctgcagctgcagcccctgcctctctgccaccttcatcacctgctgctcccattgccactttttctttgcttcctgctggtggagcccccactgtgttctcctttggttcttcatctttgaagtcatctgctacggtcactggggagcccccttcatattccagtggctccgacagctccaaagcagccccaggccctggcccatcaaccttctcttttgttcccccttctaaagcctccctagcccccacccctgcagcgtctcctgtggctccatcagctgcttcattctcctttggatcatctggttttaagcctaccctggaaagcacaccagtgccaagtgtgtctgctccaaatatagcaatgaagccctccttcccaccctcaacctctgctgtcaaagtcaaccttagtgaaaagtttactgctgcagctacctctactcctgttagtagctcccagagcgcacccccgatgtcgccattctcttctgcctccaagccagctgcttctggaccactcagccaccccacacctctctcagcaccacctagttccgtgccattgaagtcctcagtcttgccctcaccatcaggacgatctgctcagggcagttcaagcccagtgccctcaatggtacagaaatcacccaggataacccctccagcggcaaagccaggctctccccaggcaaagtcacttcagcctgctgttgcagaaaagcagggacatcagtggaaagattcagatcctgtaatggctggaattggggaggagattgcacactttcagaaggagttggaagagttaaaagcccgaacttccaaagcctgtttccaagtgggcacttctgaggagatgaagatgctgcgaacagaatcagatgacttgcatacctttcttttggagattaaagagaccacagagtcgcttcatggagatataagtagcctgaaaacaactttacttgagggctttgctggtgttgaggaagccagagaacaaaatgaaagaaatcgtgactctggttatctgcatttgctttataaaagaccactggatcccaagagtgaagctcagcttcaggaaattcggcgccttcatcagtatgtgaaatttgctgtccaagatgtgaatgatgttctagacttggagtgggatcagcatctggaacaaaagaaaaaacaaaggcacctgcttgtgccagagcgagagacactgtttaacaccctagccaacaatcgggaaatcatcaaccaacagaggaagaggctgaatcacctggtggatagtcttcagcagctccgcctttacaaacagacttccctgtggagcctgtcctcggctgttccttcccagagcagcattcacagttttgacagtgacctggaaagcctgtgcaatgctttgttgaaaaccaccatagaatctcacaccaaatccttgcccaaagtaccagccaaactgtcccccatgaaacaggcacaactgagaaacttcttggccaagaggaagaccccaccagtgagatccactgctccagccagcctgtctcgatcagcctttctgtctcagagatattatgaagacttggatgaagtcagctcaacgtcatctgtctcccagtctctggagagtgaagatgcacggacgtcctgtaaagatgacgaggcagtggttcaggcccctcggcacgcccccgtggttcgcactccttccatccagcccagtctcttgccccatgcagcaccttttgctaaatctcacctggttcatggttcttcacctggtgtgatgggaacttcagtggctacatctgctagcaaaattattcctcaaggggccgatagcacaatgcttgccacgaaaaccgtgaaacatggtgcacctagtccttcccaccccatctcagccccgcaggcagctgccgcagcagcactcaggcggcagatggccagtcaggcaccagctgtaaacactttgactgaatcaacgttgaagaatgtccctcaagtggtaaatgtgcaggaattgaagaataaccctgcaaccccttctacagccatgggttcttcagtgccctactccacagccaaaacacctcacccagtgttgaccccagtggctgctaaccaagccaagcaggggtctctaataaattcccttaagccatctgggcctacaccagcatccggtcagttatcatctggtgacaaagcttcagggacagccaagatagaaacagctgtgacttcaaccccatctgcttctgggcagttcagcaagcctttctcattttctccatcagggactggctttaattttgggataatcacaccaacaccgtcttctaatttcactgctgcacaaggggcaacaccctccactaaagagtcaagccagccggacgcattctcatctggtgggggaagcaaaccttcttatgaggccattcctgaaagctcacctccctcaggaatcacatccgcatcaaacaccaccccaggagaacctgccgcatctagcagcagacctgtggcaccttctggaactgctctttccaccacctctagtaagctggaaaccccaccgtccaagctgggagagcttctgtttccaagttctttggctggagagactctgggaagtttttcaggactgcgggttggccaagcagatgattctacaaaaccaaccaataaggcttcatccacaagcctaactagtacccagccaaccaagacgtcaggcgtgccctcagggtttaattttactgcccccccggtgttagggaagcacacggagccccctgtgacatcctctgcaaccaccacctcagtagcaccaccagcagccaccagcacttcctcaactgccgtttttggcagtctgccagtcaccagtgcaggatcctctggggtcatcagttttggtgggacatctctaagtgctggcaagactagtttttcatttggaagccaacagaccaatagcacagtgcccccatctgccccaccaccaactacagctgccactccccttccaacatcattccccacattgtcatttggtagcctcctgagttcagcaactaccccctccctgcctatgtccgctggcagaagcacagaagaggccacttcatcagctttgcctgagaagccaggtgacagtgaggtctcagcatcagcagcctcacttctagaggagcaacagtcagcccagcttccccaggctcctccgcaaacttctgactctgttaaaaaagaacctgttcttgcccagcctgcagtcagcaactctggcactgcagcatctagtactagtcttgtagcactttctgcagaggctaccccagccaccacgggggtccctgatgccaggacggaggcagtaccacctgcttcctccttttctgtgcctgggcagactgctgtcacagcagctgctatctcaagtgcaggccctgtggccgtcgaaacatcaagtacccccatagcctccagcaccacgtccattgttgctcccggcccatctgcagaggcagcagcatttggtaccgtcacttctggctcatccgtctttgctcagcctcctgctgccagttctagctcagctttcaaccagctcaccaacaacacagccactgccccctctgccacgcccgtgtttgggcaagtggcagccagcaccgcaccaagtctgtttgggcagcagactggtagcacagccagcacagcagctgccacaccacaggtcagcagctcagggtttagcagcccagcttttggtaccacagccccaggggtctttggacagacaaccttcgggcaggcctcagtctttgggcagtcggcgagcagtgctgcaagtgtcttttccttcagtcagcctgggttcagttccgtgcctgccttcggtcagcctgcttcctccactcccacatccaccagtggaagtgtctttggtgccgcctcaagtaccagtagctccagttccttctcatttggacagtcttctcccaacacaggaggggggctgtttggccaaagcaacgctcctgcttttgggcagagtcctggctttggacagggaggctctgtctttggtggtacctcagctgccaccacaacagcagcaacctctgggttcagcttttgccaagcttcaggttttgggtctagtaatactggttctgtgtttggtcaagcagccagtactggtggaatagtctttggccagcaatcatcctcttccagtggtagcgtgtttgggtctggaaacactggaagagggggaggtttcttcagtggccttggaggaaaacccagtcaggatgcagccaacaaaaacccattcagctcggccagtgggggctttggatccacagctacctcaaatacctctaacctatttggaaacagtggggccaagacatttggtggatttgccagctcgtcgtttggagagcagaaacccactggcactttcagctctggaggaggaagtgtggcatcccaaggctttgggttttcctctccaaacaaaacaggtggcttcggtgctgctccagtgtttggcagccctcctacttttgggggatcccctgggtttggaggggtgccagcattcggttcagccccagcctttacaagccctctgggctcgacgggaggcaaagtgttcggagagggcactgcagctgccagcgcaggaggattcgggtttgggagcagcagcaacaccacatccttcggcacgctcgcgagtcagaatgcccccactttcggatcactgtcccaacagacttctggttttgggacccagagtagcggattctctggttttggatcaggcacaggagggttcagctttgggtcaaataactcgtctgtccagggttttggtggctggcgaagctgagggcgtgtcagcaggcctttcgatccctgggaccaaccgcatcctcagcttcttccccgagaaatgctggagcaggctgttcagaccgacgttgccatcaaaacacatacacccagaaagaaacaacagaaaccaaaactcacaaggcgcatgattacttgttttatatttcatgttgggttttccctcccactattaaacagtctgtttccgtacaaaaaaaaaaaaaa

SEQ ID NO: 886 - protein, 2090 aa, Human
MGDEMDAMIPEREMKDFQFRALKKVRIFDSPEELPKERSSLLAVSNKYGLVFAGGASGLQIFPTKNLLIQNKPGDDPNKIVDKVQGLLVPMKFPIHHLALSCDNLTLSACMMSSEYGSIIAFFDVRTFSNEAKQQKRPFAYHKLLKDAGGMVIDMKWNPTVPSMVAVCLADGSIAVLQVTETVKVCATLPSTVAVTSVCWSPKGKQLAVGKQNGTVVQYLPTLQEKKVIPCPPFYESDHPVRVLDVLWIGTYVFAIVYAAADGTLETSPDVVMALLPKKEEKHPEIFVNFMEPCYGSCTERQHHYYLSYIEEWDLVLAASAASTEVSILARQSDQINWESWLLEDSSRAELPVTDKSDDSLPMGVVVDYTNQVEITISDEKTLPPAPVLMLLSTDGVLCPFYMINQNPGVKSLIKTPERLSLEGERQPKSPGSTPTTPTSSQAPQKLDASAAAAPASLPPSSPAAPIATFSLLPAGGAPTVFSFGSSSLKSSATVTGEPPSYSSGSDSSKAAPGPGPSTFSFVPPSKASLAPTPAASPVAPSAASFSFGSSGFKPTLESTPVPSVSAPNIAMKPSFPPSTSAVKVNLSEKFTAAATSTPVSSSQSAPPMSPFSSASKPAASGPLSHPTPLSAPPSSVPLKSSVLPSPSGRSAQGSSSPVPSMVQKSPRITPPAAKPGSPQAKSLQPAVAEKQGHQWKDSDPVMAGIGEEIAHFQKELEELKARTSKACFQVGTSEEMKMLRTESDDLHTFLLEIKETTESLHGDISSLKTTLLEGFAGVEEAREQNERNRDSGYLHLLYKRPLDPKSEAQLQEIRRLHQYVKFAVQDVNDVLDLEWDQHLEQKKKQRHLLVPERETLFNTLANNREIINQQRKRLNHLVDSLQQLRLYKQTSLWSLSSAVPSQSSIHSFDSDLESLCNALLKTTIESHTKSLPKVPAKLSPMKQAQLRNFLAKRKTPPVRSTAPASLSRSAFLSQRYYEDLDEVSSTSSVSQSLESEDARTSCKDDEAVVQAPRHAPVVRTPSIQPSLLPHAAPFAKSHLVHGSSPGVMGTSVATSASKIIPQGADSTMLATKTVKHGAPSPSHPISAPQAAAAAALRRQMASQAPAVNTLTESTLKNVPQVVNVQELKNNPATPSTAMGSSVPYSTAKTPHPVLTPVAANQAKQGSLINSLKPSGPTPASGQLSSGDKASGTAKIETAVTSTPSASGQFSKPFSFSPSGTGFNFGIITPTPSSNFTAAQGATPSTKESSQPDAFSSGGGSKPSYEAIPESSPPSGITSASNTTPGEPAASSSRPVAPSGTALSTTSSKLETPPSKLGELLFPSSLAGETLGSFSGLRVGQADDSTKPTNKASSTSLTSTQPTKTSGVPSGFNFTAPPVLGKHTEPPVTSSATTTSVAPPAATSTSSTAVFGSLPVTSAGSSGVISFGGTSLSAGKTSFSFGSQQTNSTVPPSAPPPTTAATPLPTSFPTLSFGSLLSSATTPSLPMSAGRSTEEATSSALPEKPGDSEVSASAASLLEEQQSAQLPQAPPQTSDSVKKEPVLAQPAVSNSGTAASSTSLVALSAEATPATTGVPDARTEAVPPASSFSVPGQTAVTAAAISSAGPVAVETSSTPIASSTTSIVAPGPSAEAAAFGTVTSGSSVFAQPPAASSSSAFNQLTNNTATAPSATPVFGQVAASTAPSLFGQQTGSTASTAAATPQVSSSGFSSPAFGTTAPGVFGQTTFGQASVFGQSASSAASVFSFSQPGFSSVPAFGQPASSTPTSTSGSVFGAASSTSSSSSFSFGQSSPNTGGGLFGQSNAPAFGQSPGFGQGGSVFGGTSAATTTAATSGFSFCQASGFGSSNTGSVFGQAASTGGIVFGQQSSSSSGSVFGSGNTGRGGGFFSGLGGKPSQDAANKNPFSSASGGFGSTATSNTSNLFGNSGAKTFGGFASSSFGEQKPTGTFSSGGGSVASQGFGFSSPNKTGGFGAAPVFGSPPTFGGSPGFGGVPAFGSAPAFTSPLGSTGGKVFGEGTAAASAGGFGFGSSSNTTSFGTLASQNAPTFGSLSQQTSGFGTQSSGFSGFGSGTGGFSFGSNNSSVQGFGGWRS

SEQ ID NO: 887 - DNA, 3558 bp, Human
cagaccccagttcgccgactaagcagaagaaagatcaaaaaccggaaaagaggagaagagcaaacaggcactttgaggaacaatcccctttaactccaagccgacagcggtctaggaattcaagttcagtgcctaccgaagacaaaggcgccccgagggagtggcggtgcgaccccagggcgtgggcccggccgcggagcccacactgcccggctgacccggtggtctcggaccatgtctcccgccccaagacccccccgttgtctcctgctccccctgctcacgctcggcaccgcgctcgcctccctcggctcggcccaaagcagcagcttcagccccgaagcctggctacagcaatatggctacctgcctcccggggacctacgtacccacacacagcgctcaccccagtcactctcagcggccatcgctgccatgcagaagttttacggcttgcaagtaacaggcaaagctgatgcagacaccatgaaggccatgaggcgcccccgatgtggtgttccagacaagtttggggctgagatcaaggccaatgttcgaaggaagcgctacgccatccagggtctcaaatggcaacataatgaaatcactttctgcatccagaattacacccccaaggtgggcgagtatgccacatacgaggccattcgcaaggcgttccgcgtgtgggagagtgccacaccactgcgcttccgcgaggtgccctatgcctacatccgtgagggccatgagaagcaggccgacatcatgatcttctttgccgagggcttccatggcgacagcacgcccttcgatggtgagggcggcttcctggcccatgcctacttcccaggccccaacattggaggagacacccactttgactctgccgagccttggactgtcaggaatgaggatctgaatggaaatgacatcttcctggtggctgtgcacgagctgggccatgccctggggctcgagcattccagtgacccctcggccatcatggcacccttttaccagtggatggacacggagaattttgtgctgcccgatgatgaccgccggggcatccagcaactttatgggggtgagtcagggttccccaccaagatgccccctcaacccaggactacctcccggccttctgttcctgataaacccaaaaaccccacctatgggcccaacatctgtgacgggaactttgacaccgtggccatgctccgaggggagatgtttgtcttcaaggagcgctggttctggcgggtgaggaataaccaagtgatggatggatacccaatgcccattggccagttctggcggggcctgcctgcgtccatcaacactgcctacgagaggaaggatggcaaattcgtcttcttcaaaggagacaagcattgggtgtttgatgaggcgtccctggaacctggctaccccaagcacattaaggagctgggccgagggctgcctaccgacaagattgatgctgctctcttctggatgcccaatggaaagacctacttcttccgtggaaacaagtactaccgtttcaacgaagagctcagggcagtggatagcgagtaccccaagaacatcaaagtctgggaagggatccctgagtctcccagagggtcattcatgggcagcgatgaagtcttcacttacttctacaaggggaacaaatactggaaattcaacaaccagaagctgaaggtagaaccgggctaccccaagtcagccctgagggactggatgggctgcccatcgggaggccggccggatgaggggactgaggaggagacggaggtgatcatcattgaggtggacgaggagggcggcggggcggtgagcgcggctgccgtggtgctgcccgtgctgctgctgctcctggtgctggcggtgggccttgcagtcttcttcttcagacgccatgggacccccaggcgactgctctactgccagcgttccctgctggacaaggtctgacgcccaccgccggcccgcccactcctaccacaaggactttgcctctgaaggccagtggcagcaggtggtggtgggtgggctgctcccatcgtcccgagccccctccccgcagcctccttgcttctctctgtcccctggctggcctccttcaccctgaccgcctccctccctcctgccccggcattgcatcttccctagataggtcccctgagggctgagtgggagggcggccctttccagcctctgcccctcaggggaaccctgtagctttgtgtctgtccagccccatctgaatgtgttgggggctctgcacttgaaggcaggaccctcagacctcgctggtaaaggtcaaatggggtcatctgctccttttccatcccctgacataccttaacctctgaactctgacctcaggaggctctgggcactccagccctgaaagccccaggtgtacccaattggcagcctctcactactctttctggctaaaaggaatctaatcttgttgagggtagagaccctgagacagtgtgagggggtggggactgccaagccaccctaagaccttgggaggaaaactcagagagggtcttcgttgctcagtcagtcaagttcctcggagatctgcctctgcctcacctaccccagggaacttccaaggaaggagcctgagccactggggactaagtgggcagaagaaacccttggcagccctgtgcctctcgaatgttagccttggatggggctttcacagttagaagagctgaaaccaggggtgcagctgtcaggtagggtggggccggtgggagaggcccgggtcagagccctgggggtgagcctgaaggccacagagaaagaaccttgcccaaactcaggcagctggggctgaggcccaaaggcagaacagccagagggggcaggaggggaccaaaaaggaaaatgaggacgtgcagcagcattggaaggctggggccgggcaggccaggccaagccaagcagggggccacagggtgggctgtggagctctcaggaagggccctgaggaaggcacacttgctcctgttggtccctgtccttgctgcccaggcagcgtggaggggaagggtagggcagccagagaaaggagcagagaaggcacacaaacgaggaatgaggggcttcacgagaggccacagggcctggctggccacgctgtcccggcctgctcaccatctcagtgaggggcaggagctggggctcgcttaggctgggtccacgcttccctggtgccagcacccctcaagcctgtctcaccagtggcctgccctctcgctcccccacccagcccacccattgaagtctccttgggccaccaaaggtggtggccatggtaccggggacttgggagagtgagacccagtggagggagcaagaggagagggatgtcgggggggtggggcacggggtaggggaaatggggtgaacggtgctggcagttcggctagatttctgtcttgtttgtttttttgttttgtttaatgtatatttttattataattattatatatgaattccaaaaaaaaaaaaaaaaaaaaa

SEQ ID NO: 888 - protein, 582 aa, Human
MSPAPRPPRCLLLPLLTLGTALASLGSAQSSSFSPEAWLQQYGYLPPGDLRTHTQRSPQSLSAAIAAMQKFYGLQVTGKADADTMKAMRRPRCGVPDKFGAEIKANVRRKRYAIQGLKWQHNEITFCIQNYTPKVGEYATYEAIRKAFRVWESATPLRFREVPYAYIREGHEKQADIMIFFAEGFHGDSTPFDGEGGFLAHAYFPGPNIGGDTHFDSAEPWTVRNEDLNGNDIFLVAVHELGHALGLEHSSDPSAIMAPFYQWMDTENFVLPDDDRRGIQQLYGGESGFPTKMPPQPRTTSRPSVPDKPKNPTYGPNICDGNFDTVAMLRGEMFVFKERWFWRVRNNQVMDGYPMPIGQFWRGLPASINTAYERKDGKFVFFKGDKHWVFDEASLEPGYPKHIKELGRGLPTDKIDAALFWMPNGKTYFFRGNKYYRFNEELRAVDSEYPKNIKVWEGIPESPRGSFMGSDEVFTYFYKGNKYWKFNNQKLKVEPGYPKSALRDWMGCPSGGRPDEGTEEETEVIIIEVDEEGGGAVSAAAVVLPVLLLLLVLAVGLAVFFFRRHGTPRRLLYCQRSLLDKV

SEQ ID NO: 889 - DNA, 5169 bp, Human
agcttgcgggacacggagccgcgaggagacagctgaggcccgcggagaccagggggtgaagcctggagaccctcttgccctggcctagctgcaggcccccgggatgctttgggcatgtcctctggagccccacagaagagcagcccaatggccagtggagctgaggagaccccaggcttcctggacacgctcctgcaagacttcccagccctgctgaacccagaggaccctctgccatggaaggccccagggacggtgctcagccaggaggaggtggagggcgagctggctgagctggccatgggctttctgggcagcaggaaggccccgccaccacttgctgctgctctggcccacgaagcagtttcacagctgctacagacagacctttccgaattcaggaagttgcccagggaggaagaagaagaggaggaggacgatgacgaggaggaaaaggcccctgtgaccttgctggatgcccaaagcctggcacagagtttctttaaccgcctttgggaagtcgccggccagtggcagaagcaggtgccattggctgcccgggcctcacagcggcagtggctggtctccatccacgccatccggaacactcgccgcaagatggaggaccggcacgtgtccctcccttccttcaaccagctcttcggcttgtctgaccctgtgaaccgcgcctactttgctgtgtttgatggtcacggaggcgtggatgctgcgaggtacgccgctgtccacgtgcacaccaacgctgcccgccagccagagctgcccacagaccctgagggagccctcagagaagccttccggcgcaccgaccagatgtttctcaggaaagccaagcgagagcggctgcagagcggcaccacaggtgtgtgtgcgctcattgcaggagcgaccctgcacgtcgcctggctcggggattcccaggtcattttggtacagcagggacaggtggtgaagctgatggagccacacagaccagaacggcaggatgagaaggcgcgcattgaagcattgggtggctttgtgtctcacatggactgctggagagtcaacgggaccctggccgtctccagagccatcggggatgtcttccagaagccctacgtgtctggggaggccgatgcagcttcccgggcgctgacgggctccgaggactacctgctgcttgcctgtgatggcttctttgacgtcgtaccccaccaggaagttgttggcctggtccagagccacctgaccaggcagcagggcagcgggctccgtgtcgccgaggagctggtggctgcggcccgggagcggggctcccacgacaacatcacggtcatggtggtcttcctcagggacccccaagagctgctggagggcgggaaccagggagaaggggacccccaggcagaagggaggaggcaggacttgccctccagccttccagaacctgagacccaggctccaccaagaagctaggtggtttccaggcccctgccctccccttcctcccatccttgtccttctctccctcagaagcctcaggacccaacaggtggcaggcagtggacagggtgcccgccccacagtgctttccccagcaccccagagccagtcgggacaccccccgcagcccgtcctggtggctgtggaactgcactgggtggcgggcagatggtggaaggcagcttaggagacctcaccaaagagaagatggaccggctcttgctcccagctcctattaggcccggggtgggaccagaggtcataggtgcccaacggcagccaaaccaaagacactggtgtgcatggggcagcatggttgtgcacgtgggaccctggggcggacccaggagccaaactcttgaagcaccccctgggtcaggcccagcagcggagtggccagccccagtttcccattgctcctctctgcggccagggccaggtgggttcatatttacagatatgcccagccagtcctggtcggccacaccagtgtcccaaagaggagagcgcagcagagccaggggtctgttctgtagcagccacccccctgcccccactccagggcagccatgatgtgcttgggcccaccagggccttccgggctgctctcttccctgagcccggaaccggcgacgcacatgtgtcttttgttggtgtgtttgtttttttccagggaggtctaattccgaagcagtattccaggttttctctttgttttatcagtgccaagatgacctgttgtgtcatataatttaagcagagcttagcatttattttattctttagaaaacttaagtatttacttttttaaagctatttttcaaggaacctttttttgcagtattattgaatttattttctaaatcaggattgaaacaggaacttttccaggtggtgttaataagccattcaagtgccttacacagctttgaagaaactaggactgcagtgggctcggataggcccattgaggtttttagaaaagcaggatttgttttgttagggaggcatgattttggtgagatctttctggaagagttttccgcctctttgtgatgctgaacacccccaaggttctcccctccccccgctgcccaggtgactggcaggagctgcgactgccacgtagtggtgcctgggcccgacagcggggctctgggcatcccgggtgaccttggcccatctgcctgcattcccacccccttgggcctggctggatcccaggcagagggaccttgctgctgtgtgattggaacattcccaaatatcttgtgaatttgtaatcaaattggtctcattgggaaagactcttaattaagaggctcaggcaagcacagaggcagcccgtgggtctctgtctcagtctggaggcagcagggatgctgctgggagtccatggcacaggccacagcccctcaccttgccgcggtggctggcagcacgcctgccttgctctgccccatgccctgaacaggcatgagagctccacgtcccctagtgcaccctgagagggggctcacaagtgaccgatcctgggtgcctcagggagctcactgagggcgtgcaaagttgaaagtggcaaggctgggggagggtgtcgggtagagggaagagggcagggggctaggggaggactcagaggccatctgcagggccaagccacaggaagggctgagctggaggtgggcagggctgctccaggcaggtcagagcagtgcagggggaggagaggagaaagggaggaagctgggctgtgtggtccccatgaaggcattcagagtccacctgcagacagcgagagccccaggaaggtttgcacagctgtgccccaagcaccttggcctcctctcagctcgccgaggaggcacgctagagccgccttcccggtgggagccctctgtcccacagggagcggggagccagctttgctggggccctacctgcatgcccagccttacccctcattctcacagcacagatgaggttgagaccatgcagtcaatgcattgcttaaggtctcttatttacaaaaaaaaaccttaaacatagtcgctgtcattcagacattcagagaatggttggccacaaacaatgaccaagtattgcttggcttaacttgaaggcctgctgtctccttctgggggtcagggacgcagctccaccctcaccactagcccaccctgcccgtgggcataaccttgacgaagagagagaatgattggcatctgcttttctcttttctttgctaataattctgttcctggctgccgagagtgaagtttcaccatgtggaggtttggctcctatcacctggtggtctgattcataccctagcctgaggctccactggaagatctcgcagcctcagtgtatgggaaaccctttccccaggcttgtcccagcactgccgctccccacccctgagccaggaccccagaggatggccatgccccgtgcctggcagaggtctggtgccagcactgggagctgctccgcccttgccttggggccgagggagccctcgtccacccctgcacagcagctgggcacagaggagcgctcttccatcttgaccaggactgcaccaagaagcaccaggtgtcttcagcctccaacctccggggcgaccttctcttccagccacagtcccatgagggcccctagccagggacactggtctgtaaattgtaatcctttctccagcccagctctccacttgttccttgtgtgagctgagcaggcagtgcacctctgagtgtcccttttgtaaggcccaggggttgcactgagtctgcagaggccgcgacctcctagaacgctgtgggtgcaggtgagccggcgtgtcctggggagatgctgccagcacacaggggccctcctgctgccagcaggttggggtggttaagtcttattagtgtctattcttaaaattaagtgggctggagaagaatggagctccacatgccagcaccgtatatggaatacaaaagctggggaagcagggcctgccttacaggtgtggctgactctgagcccaggcctgcaggggtggagggcagtccctcagaatcccagaggcagtcccagcctcagaacccaggataggaaatgggtgtgtttagtggggaaagggacggggtgcagacggcagggccagtatggggccccctccctctcctctcctctcctatggtgagcccagcgtgggcaccgggccgtctcagccgtgttcccagggctgggaggacagctctggcccttcttaggcctagcctcgtcccaagctaaatgtaagccagttgggctgtgttaaaggaagcagtgtttttggttcgattctgcctctgtagctcaaggggggcagcccccagagtcctgtgcattctgccaaggctccatagctttgccaaatgcacggagctctgccattccggtgcagtgcaggccttgcgaagggtttatctgcgttcgtctcggtgggcttctcctgcatgggagttgtgttcctgtgcaagggggagctttgctccaggacaggatgactgtcttccctattcttagggacaagtcccaagatgccagaaaggcagtctcccaaggacccaccatgcagaagtgtcaataaaccacaagttctgaactctgaaaaaaaaaaaaaaaaaa

SEQ ID NO: 890 - DNA, 2745 bp, Human
acctccctccgcggagcagccagacagcgagggccccggccgggggcaggggggacgccccgtccggggcaccccccccggctctgagccgcccgcggggccggcctcggcccggagcggaggaaggagtcgccgaggagcagcctgaggccccagagtctgagacgagccgccgccgcccccgccactgcggggaggagggggaggaggagcgggaggagggacgagctggtcgggagaagaggaaaaaaacttttgagacttttccgttgccgctgggagccggaggcgcggggacctcttggcgcgacgctgccccgcgaggaggcaggacttggggaccccagaccgcctccctttgccgccggggacgcttgctccctccctgccccctacacggcgtccctcaggcgcccccattccggaccagccctcgggagtcgccgacccggcctcccgcaaagacttttccccagacctcgggcgcaccccctgcacgccgccttcatccccggcctgtctcctgagcccccgcgcatcctagaccctttctcctccaggagacggatctctctccgacctgccacagatcccctattcaagaccacccaccttctggtaccagatcgcgcccatctaggttatttccgtgggatactgagacacccccggtccaagcctcccctccaccactgcgcccttctccctgaggagcctcagctttccctcgaggccctcctaccttttgccgggagacccccagcccctgcaggggcggggcctccccaccacaccagccctgttcgcgctctcggcagtgccggggggcgccgcctcccccatgccgccctccgggctgcggctgctgccgctgctgctaccgctgctgtggctactggtgctgacgcctggcccgccggccgcgggactatccacctgcaagactatcgacatggagctggtgaagcggaagcgcatcgaggccatccgcggccagatcctgtccaagctgcggctcgccagccccccgagccagggggaggtgccgcccggcccgctgcccgaggccgtgctcgccctgtacaacagcacccgcgaccgggtggccggggagagtgcagaaccggagcccgagcctgaggccgactactacgccaaggaggtcacccgcgtgctaatggtggaaacccacaacgaaatctatgacaagttcaagcagagtacacacagcatatatatgttcttcaacacatcagagctccgagaagcggtacctgaacccgtgttgctctcccgggcagagctgcgtctgctgaggaggctcaagttaaaagtggagcagcacgtggagctgtaccagaaatacagcaacaattcctggcgatacctcagcaaccggctgctggcacccagcgactcgccagagtggttatcttttgatgtcaccggagttgtgcggcagtggttgagccgtggaggggaaattgagggctttcgccttagcgcccactgctcctgtgacagcagggataacacactgcaagtggacatcaacgggttcactaccggccgccgaggtgacctggccaccattcatggcatgaaccggcctttcctgcttctcatggccaccccgctggagagggcccagcatctgcaaagctcccggcaccgccgagccctggacaccaactattgcttcagctccacggagaagaactgctgcgtgcggcagctgtacattgacttccgcaaggacctcggctggaagtggatccacgagcccaagggctaccatgccaacttctgcctcgggccctgcccctacatttggagcctggacacgcagtacagcaaggtcctggccctgtacaaccagcataacccgggcgcctcggcggcgccgtgctgcgtgccgcaggcgctggagccgctgcccatcgtgtactacgtgggccgcaagcccaaggtggagcagctgtccaacatgatcgtgcgctcctgcaagtgcagctgaggtcccgccccgccccgccccgccccggcaggcccggccccaccccgccccgcccccgctgccttgcccatgggggctgtatttaaggacaccgtgccccaagcccacctggggccccattaaagatggagagaggactgcggatctctgtgtcattgggcgcctgcctggggtctccatccctgacgttcccccactcccactccctctctctccctctctgcctcctcctgcctgtctgcactattcctttgcccggcatcaaggcacaggggaccagtggggaacactactgtagttagatctatttattgagcaccttgggcactgttgaagtgccttacattaatgaactcattcagtcaccatagcaacactctgagatggcagggactctgataacacccattttaaaggttgaggaaacaagcccagagaggttaagggaggagttcctgcccaccaggaacctgctttagtgggggatagtgaagaagacaataaaagatagtagttcaggccaggcggggtgctcacgcctgtaatcctagcacttttgggaggcagagatgggaggatacttgaatccaggcatttgagaccagcctgggtaacatagtgagaccctatctctacaaaacacttttaaaaaatgtacacctgtggtcccagctactctggaggctaaggtgggaggatcacttgatcctgggaggtcaaggctgcag

SEQ ID NO: 891 - protein, 391 aa, Human
MPPSGLRLLPLLLPLLWLLVLTPGPPAAGLSTCKTIDMELVKRKRIEAIRGQILSKLRLASPPSQGEVPPGPLPEAVLALYNSTRDRVAGESAEPEPEPEADYYAKEVTRVLMVETHNEIYDKFKQSTHSIYMFFNTSELREAVPEPVLLSRAELRLLRRLKLKVEQHVELYQKYSNNSWRYLSNRLLAPSDSPEWLSFDVTGVVRQWLSRGGEIEGFRLSAHCSCDSRDNTLQVDINGFTTGRRGDLATIHGMNRPFLLLMATPLERAQHLQSSRHRRALDTNYCFSSTEKNCCVRQLYIDFRKDLGWKWIHEPKGYHANFCLGPCPYIWSLDTQYSKVLALYNQHNPGASAAPCCVPQALEPLPIVYYVGRKPKVEQLSNMIVRSCKCS

SEQ ID NO: 892 - DNA, 4103 bp, Human
ggagccctgggcgcgggggcggcgtgtcaggtggttgcggagctggtaagaatcatattctaagaactcagccactcaggtatccaccatggtgctgggtcctgaacagaagatgtcagatgacagtgtttctggagatcatggggagtctgccagtcttggtaacatcaaccctgcctatagtaatccctctctttcacagtcccctggggactcagaggagtacttcgccacttactttaatgagaagatctccattcctgaggaggagtactcttgttttagctttcgtaaactctgggctttcaccggaccaggttttcttatgagcattgcctacctggatccaggaaatattgaatccgatttgcagtctggagcagtggctggatttaagttgctctggatccttctgttggccacccttgtggggctgctgctccagcggcttgcagctagactgggagtggttactgggctgcatcttgctgaagtatgtcaccgtcagtatcccaaggtcccacgagtcatcctgtggctgatggtggagttggctatcatcggctcagacatgcaagaagtcattggctcagccattgctatcaatcttctgtctgtaggaagaattcctctgtggggtggcgttctcatcaccattgcagatacttttgtatttctcttcttggacaaatatggcttgcggaagctagaagcattttttggctttctcatcactattatggccctcacatttggatatgagtatgttacagtgaaacccagccagagccaggtactcaagggcatgttcgtaccatcctgttcaggctgtcgcactccacagattgaacaggctgtgggcatcgtgggagctgtcatcatgccacacaacatgtacctgcattctgccttagtcaagtctagacaggtaaaccggaacaataagcaggaagttcgagaagccaataagtactttttcattgaatcctgcattgcactctttgtttccttcatcatcaatgtctttgttgtctcagtctttgctgaagcattttttgggaaaaccaacgagcaggtggttgaagtctgtacaaataccagcagtcctcatgctggcctctttcctaaagataactcgacactggctgtggacatctacaaagggggtgttgtgctgggatgttactttgggcctgctgcactctacatttgggcagtggggatcctggctgcaggacagagctccaccatgacaggaacctattctggccagtttgtcatggagggattcctgaacctaaagtggtcacgctttgcccgagtggttctgactcgctctattgccatcatccccactctgcttgttgctgtcttccaagatgtagagcatctaacagggatgaatgactttctgaatgttctacagagcttacagcttccctttgctctcatacccatcctcacatttacgagcttgcggccagtaatgagtgactttgccaatggactaggctggcggattgcaggaggaatcttggtccttatcatctgttccatcaatatgtactttgtagtggtttatgtccgggacctagggcatgtggcattatatgtggtggctgctgtggtcagcgtggcttatctgggctttgtgttctacttgggttggcaatgtttgattgcactgggcatgtccttcctggactgtgggcatacggtaagcatctctaaaggcctgctgacagaagaagccacccgtggctacgttaaataacactggattagtctgtcttctgcaggtagccatcagagccagtgtgtttctatggtttactgtgtgaacatagccaaaagtatgtgccgttgcacagactgtgtttatgactcaaccgttggttggaaaagactttgtttcatgtgtatttgaaagatggaattattttttccttcctgacctaaccttagaactggattagggtgggatctttgaaaagctgacatttgctgctatcattccaacactaaattcttaagtagttgcccaagggccagctcagtttatccttcggagagacaaggatatgcatgattcttaaccaggctatatgttaaaaaaaaattggaaaatgcaatacattttttattatacaaactacagaatgagtatgcaagttttatttatcaaaatgtaatggatttttaaaggctgagaaattttccttatacctaccttttcagttattttaattataccaaattatcaactagaatagcttcatccatatgaaatataaaatgaagagacacctagctctatcaggcttaggattctttgaacttatttccactttaatttctcagtggaagttaagaggggtgagaaaacaaagaaggggaaaaactgacaactaacaaaaccagcaccacatcgctaggtggtgcttactaattaccttctcaggattttcctcagattgaaaagcttatgaggatttcttgggagtcttaataacctgcctgttagtacagagctttcctgatgatatttactcttgagcacatgtggttgtaaaaccttaactttctttctccaggagggtggtgatagaaacagatggtagtatttatgaactgatgttctcgtgaaatgttgagggtggggagaaaagactttaagggaggagagccatctattttgttcctaaagccacctctcagcagaatcgtcatgtttttctgatgcaccgctctgcttcatgcccaagatgacttgcgaggcaatctcaggagctgtggacttaaccgttgcaaagcacactgtctttctcagcgttctctgcaagtcagtaggtgttagtatggttgcaaagttcactgtctcagcaaagttgaactgggctacctctctacagctgtttcctcagagggaaaaatcttgagaccatggtggagctctggagtcagaggaaatgggtgtcttcagcacaaagctgctgcttttacttcagccacttctgacatttttacataccgagcctgagattgtgtgattatctcaaatcaaatcactttgatggagataaataatcaaaactgttttatagtcattgatttggtgagaacagtaatggaaaatggtgttgaaggacttctcatttttggagctttccttccagagtcctggctgattggtgttcgctgttcatctgagcccccaaaagcattattactgatacttgcacacagtcaaaagcgcagactggatggatggtcttttataaggcatttaagggtacactactgtgtttcactgaccatacatttttcttagcccctcaagtaatatagcacagagttatgaatgacaattcccctaaccattcctcttcatatctgcctcttccccttaccatcgtaattctccaaactggtcataaaggcactctgtgaagatattggggactgacatcttaagctctcacctggctgcagtaggaaaggccaaactgacgacaaaaaaaaaattctttataaagatgatatggtaacatgtatctttgccctgggtctgggtgggtccagtcagtctcagatttacaagcatttaggagcctaggtaaaagctgctagtattcttttaaaagttatatttatgacttgcaatgatagaaaactccttccaattaaatggcattttataatattatgtgtgtacttcacagtgttaaaaataccctcatacgttattgcatttgatcttcacagaaagtgcattttaaccagtactctgggtgcaataaataatatgtagaaatttaagtcctccaattccagcatatccagtgagttttgacagtgtgtttatgtggaatgtttaaggatatacaattgtactttatataaattggttcttgttcttcttaaatgtgacatgaaataattgtgctgctacattatactggaaattaacaggggaaaagggaagagctcttggctcccttgaggttctgctagtggtgttaggagtggttacaactgagcttttagtaaccatttaaccgtatgtaaacttggtttctaattaaaaaaaaatttctttttcc

SEQ ID NO: 893 - protein, 561 aa, Human
MVLGPEQKMSDDSVSGDHGESASLGNINPAYSNPSLSQSPGDSEEYFATYFNEKISIPEEEYSCFSFRKLWAFTGPGFLMSIAYLDPGNIESDLQSGAVAGFKLLWILLLATLVGLLLQRLAARLGVVTGLHLAEVCHRQYPKVPRVILWLMVELAIIGSDMQEVIGSAIAINLLSVGRIPLWGGVLITIADTFVFLFLDKYGLRKLEAFFGFLITIMALTFGYEYVTVKPSQSQVLKGMFVPSCSGCRTPQIEQAVGIVGAVIMPHNMYLHSALVKSRQVNRNNKQEVREANKYFFIESCIALFVSFIINVFVVSVFAEAFFGKTNEQVVEVCTNTSSPHAGLFPKDNSTLAVDIYKGGVVLGCYFGPAALYIWAVGILAAGQSSTMTGTYSGQFVMEGFLNLKWSRFARVVLTRSIAIIPTLLVAVFQDVEHLTGMNDFLNVLQSLQLPFALIPILTFTSLRPVMSDFANGLGWRIAGGILVLIICSINMYFVVVYVRDLGHVALYVVAAVVSVAYLGFVFYLGWQCLIALGMSFLDCGHTVSISKGLLTEEATRGYVK

SEQ ID NO: 894 - DNA, 3236 bp, Human
gaccgggcggcgtgggcgtgagaggcggggcggggccgcgctctgcttgccaatgtctttataggtcacccggaaggcacgcggaacctcggcgcggtgcttccagcagggtctctccgccactccagccccgcgcccctcgccgcggccctcgggcgtctgcgccgcagctgccgcccccgcctctttggagtctctcgcggcctcaaagcgcggcctgcgtcgcttccggcagttcccgaccgcgggcgatggctgccgctgggggcgcccggctgctgcgcgccgcttctgctgtcctcggcggcccggccggccggtggctgcaccacgctgggtcccgcgctggatccagcggcctgctgaggaaccgggggccgggcgggagcgcggaggcgagccggtcgctgagcgtgtcggcgcgggcccggagcagctcagaagataaaataacagtccactttataaaccgtgatggtgaaacattaacaaccaaaggaaaagttggtgattctctgctagatgttgtggttgaaaataatctagatattgatggctttggtgcatgtgagggaaccctggcttgttcaacctgtcacctcatctttgaagatcacatatatgagaagttagatgcaatcactgatgaggagaatgacatgctcgatctggcatatggactaacagacagatcacggttgggctgccaaatctgtttgacaaaatctatggacaatatgactgttcgagtgcctgaaacagtggctgatgccagacaatccattgatgtgggcaagacctcctgaactagaacaaataggaatattttcatggaattttacctatttttataattattatttcttaaagtgattaaatgagaacatggatgagtggacttcatattatgactagctttactattttaattcaccttgcataactactgaattttgtcattcttgaaagtatgcaatttttattttggttatattacaaaaatgtcaatcaaatattaaaaaatagttaatgtgatagaaaaaccttacatatttttttcttatgtttgtttagcgactttagcaaaatgttttcatataatctcatctgtttacctagaagataggttaaggaaatatattattattcctgtttgatgtgggtgaaggcagagatctaacctggcttgtttagggccataccactaattagaaaatctgtgctagaacctgtgtcttattcctataagctatgtgttcagactgaaactggagaaattatgactattttatttatagtagtagttaaatctgaatgtgtatggacaaaaatatttaattgctcagtaaactgcttaacttcaaagatagttattgaccttataaataaatatttcaaaattttgattcggaagactaagtctggacgtagacattataatgctatcaaagaagtttgatctctgttttgactaaactagaggaaaaatgattggatgtgtttattcttttctaagcagaatggtttaactttgtactctttgaaaaataatgctgatttataaatctctgcctataacagaatggaaaccttatgaatgaattgtgtttctctgtcctgagctggagaagggaatgagcaggctgacacgttgcacagccccaggtggcgccattctctcacgcaaggatggggctgcagggtgagcagcgtgggctgcagtgtgtcagtcccaggagtgagggagtggcaagcaccacagattaccacgtatgtgtggaagacattcgtactcttatctttactataaataaattcataaaagttaacaaaggggtacacagtatggtctttggaaatataataaaacatcaactaacttggactaattgtgaggaagagcagaacaaattagtagaaagaggttataagacaattgagttagcttcatgtgtattattgcagcttgatcatttatataaatatttgtctagtacaatgcttgacatacagcattgtgttatgcccattggggacacagaggtgaacaagacaaggaatgccatcagggaattcaccttttattaggaaaatataaaatatgtatgtatgtgcagataatttgcttgaactaaactgactagttctgctaaataagattttaaactaattcatatgtaaaaagtgattaggaagaacttgaagtatcatttgatgcttaataactattgagtagttttttttttttttttttggtggggggagcgggggacagggtcttactctgtcactcaggccagagtacaatagtatgatctcggctcactgcaacttctgcctcccagtttcaagggattctcgtgcctcagcctcccaggtagctggtactacaggcacggaccaccacgcctggctaatttttgtattttttctagggacagggttttaccacgttgcccaggctggtcttgaacttttgagctcgagtgatccacccacctcagcctcccaaaatgctgggattacagatgtgagccaccgtgcttggccataactattgaatgctttctatgtggagagtgcttgtcttaattttctgttgctataatagaataacacagactgggtaatttataaagaaaagagatttatttggatcatggttctggaggctgggaggtccaagagcatggtaccagcatctgcttggcatctggtgacagctttcttgctgcatcattacatggtggaagggcaagagaatgcgagtgagagcaagagggcaaaatgattatccttttatcaggagcccacttctgacataactaacccacacctgagataacggcattaatccattcatgaggtctctgctcttaaaggagatcacctcttaaaggacccacctttcaatgccattacactggcaatttaatttcaagatgagttttggaggggacattcaaaccatagcagtgctataattttaaagtacttcaaagccaatttattctcttaattagcttcattattcttgtctttgtgtgtggattacctaaactctccttccagagctactttaatgattatattcaaccaaagcactctaaaatttagagtataaattgtcttatatttcaaattagaaaagttcaaatgaagtttaattgtgttattttataaaaccttctaaaattattaaatggaggatataatctaaaaaaaaaaaaaaaaaa

SEQ ID NO: 895 - DNA, 1094 bp, Human
ccgccccggtccgcaaagccggtggcgcccggaggctgcacggagagcggtgcccgcgtcagtgaccgaaggaagagaccaagatgaatgcagagcccgagaggaagtttggcgtggtggtggttggtgttggccgagccggctccgtgcggatgagggacttgcggaatccacacccttcctcagcgttcctgaacctgattggcttcgtgtcgagaagggagctcgggagcattgatggagtccagcagatttctttggaggatgctctttccagccaagaggtggaggtcgcctatatctgcagtgagagctccagccatgaggactacatcaggcagttccttaatgctggcaagcacgtccttgtggaataccccatgacactgtcattggcggccgctcaggaactgtgggagctggctgagcagaaaggaaaagtcttgcacgaggagcatgttgaactcttgatggaggaattcgctttcctgaaaaaagaagtggtggggaaagacctgctgaaagggtcgctcctcttcacagctggcccgttggaagaagagcggtttggcttccctgcattcagcggcatctctcgcctgacctggctggtctccctctttggggagctttctcttgtgtctgccactttggaagagcgaaaggaagatcagtatatgaaaatgacagtgtgtctggagacagagaagaaaagtccactgtcatggattgaagaaaaaggacctggtctaaaacgaaacagatatttaagcttccatttcaagtctgggtccttggagaatgtgccaaatgtaggagtgaataagaacatatttctgaaagatcaaaatatatttgtccagaaactcttgggccagttctctgagaaggaactggctgctgaaaagaaacgcatcctgcactgcctggggcttgcagaagaaatccagaaatattgctgttcaaggaagtaagaggaggaggtgatgtagcacttccaagatggcaccagcatttggttcttctcaagagttgaccattatctctattcttaaaattaaacatgttggggaaacaagaaaaaaaaaaaaaaa

SEQ ID NO: 896 - DNA, 6345 bp, Human
gtaaggtctcggaagtacgaggcggaggggacgaaaaacggggggccagactgttgtggctgtggtggagacgagaaaccaggaagaagaggctcgcctcccactcggcgacagtaagcgaagcagccgaaggcgagcgccgacatcagcagctgccccctaaatcccgcccttcgtcttggcggcagcgggagactgagagacgcgcgcagcaggggcgggactggagaggggccccgcgcgcggatctcgcgagagcattagagggcggaagcgctatccgagcaggatgcggttcgtggttgccttggtcctcctgaacgtcgcagcggcgggagccgtgccgctcttggccaccgaaagcgtcaagcaagaagaagctggagtacggccttctgcaggaaacgtctccacccaccccagcttgagccaacggcctggaggctctaccaagtcgcatccggagccgcagactccaaaagacagccctagcaagtcgagtgcggaggcgcagaccccagaagacacccccaacaagtcgggtgcggaggcaaagacccaaaaagacagctccaacaagtcgggtgcggaggcaaagacccaaaaaggcagcactagcaagtcgggttcggaggcgcagaccacaaaagacagcactagtaagtcgcatccggagctgcagactccaaaagacagcactggcaaatcgggtgcggaggcgcagaccccagaagacagccccaacaggtcgggtgcggaggcaaagacccaaaaagacagccctagcaagtcaggttcggaggcgcagaccacaaaagatgtccctaataagtcgggtgcggacggccagaccccaaaagacggctccagcaagtcgggtgcggaggatcagaccccaaaagacgtccctaacaagtcgggtgcggagaagcagactccaaaagacggctctaacaagtccggtgcagaggagcagggcccaatagacgggcccagcaagtcgggtgcggaggagcagacctcaaaagacagccctaacaaggtggttccagagcagccttcccggaaagaccattccaagcccatctccaacccttctgataacaaggagctccccaaggctgacacaaaccagcttgctgacaaagggaagctttctcctcatgctttcaaaaccgaatctggggaggaaactgacctcatttctcccccgcaggaggaagttaagtcttcagagcctactgaggatgtggagcccaaagaggctgaagatgatgatacaggacccgaggagggctcaccgcccaaagaagagaaagaaaagatgtccggttctgcctccagtgagaaccgtgaagggacactttcggattccacgggtagcgagaaggatgacctttatccgaacggttctggaaatggcagcgcggagagcagccacttctttgcatatctggtgactgcagccattcttgtggctgtcctctatatcgctcatcacaacaagcggaagatcattgcttttgtcctggaaggaaaaagatctaaagtcacccggcggccaaaggccagtgactaccaacgtttggaccagaagtcctaacagaatggtatattcctctggaaaaagatgaacgtcaccaatggattgtgctgctctcgtttcagctttgatttttttgtccttgagaaccttgtcctccctgctgatttgtttctaaatcaaaagaaatgaagaaaaaagtactgtgacctgagagacaccctcctctagaatttagtggcgggtctgggctggcagaggtagggggctgctttgggctttgcacctgcactttggtgacattgttcttctgtgttccctttatttatgctggtggcttccatccgttcctcctctgagggtgagtggaggggtatatggaaacacggctatgaccaaagggagatcccagcctgggcaggctgcgctgctgaccaccctccctggggcccgggctctgtaggaaagttggtccttgactgtggcattgcactctgcactgtttctctctgcagacctaggggaaaactgcaggtggaagtgcttttctactaaggcctcttactttgggggggatgtgccctacagaagacatagaagatggggaaatgccaatgggcaaagagctactttgaatacataattctcttcaaagacttcagcagcaaaccaaaacagcaggttaaaaaaaaagatgcttttttgggtgcaagtctaacctgtctagcatgagatcttcttgattttctgattattttatgtagcttgagacaaagtgaatcaacttccacttagttgtaccgagcataaaacagaacttgggcttcctggcagtgaggccactgtcccatcacagatttttaaaataaatatgatttgaagtagtgtgatctttcacacaatcatactcagtaggaactttttgaaatagggcaagtttatgtttcatgcgagaaaacatgaaggagggttttggttttggtctgcagtttttccaaagggcttttatgagatacatttcccacaaagtccattttgcctttgttgcctaaaacagacaaaatagacttagatttattaatagaaactatactctctgccaattttacctcagtgtatttaatggtcctttaatctgatataagatgccaagggtatttgataaaaattcttcttccatgccatgtcaggagttaatacaaatgaagaaattccgtgggttcccctgggataagtgagggtagtgtcttggacaacactattgtttgaaggtttatcttttctaatcatgctctaccgcattgtagagagcctaaagagagttgtttctgagctgatctcagggaaatacaaataacttgggagatgagggaaataagatgaattctgtgctgtcaaggcagtaagtctgaagaaaggaccatgcttcttatattatcttccaccttgcttaaaacagcccatagctttgagttgacattttcattcttggcggatagcctactttatgaaggtaaggaatgaactcctacccttcttgggtcattctctgtactgatgcgttagtcttataatactttgcaccaacctgaggaatcttctaggcttctctagcatcccctaagactgtggctatttcacgtctctctccctgcctgccttccttttcccttcctttcccctcctcatgttttctggttgtgcccatctgtaccagctcctttccatccaccttcgtatgcacccagatttttctgttcccatctgtcctatttgttattcatcccgctgctcaacttctccagtatgttgcttcccttaagttgccattcattctcttcatgacttttactaactcacttcggtctctgtctgtcaactaaacttttctaaaggttaccagttatccaatcaccaaatccatggctttttctcaaagcttagtcttgtccttggcagaactggacactattgaccatccaaatggaaattcccctttcttggtgtctctgacaaatggtcctttgccttatcttgtgctggtggtgaagaggccctcaaagccaggcctctctattcctttgactgtctcctcagccattaacccattcttcatcctcggagtgagtgattcccaagtctttgtcttggcttaatccctaaagaacccagttctgctggtatcgaatagttcagcttggttgtcattgaaaggaatttctctcttctgtccatcagcctgtccctcccaactgtctaggacagtcttcggtcacctaaattcctaactgcagacttttgccctttttctctctcatcaccaaagtcccatccatttttttttaataaaagatcctcagctacagtctttccattttccttgcttctcttattgcacacccccagcccattttgcttctctcttggattttgttttttcagatccacatttattgggtttcctgtccagcttcttggaaaggagctcactcttggaaagactgatctttccaaaatattttccctggtctgaagctttggtgtgaacttctcaaggcttagagaatccagttacagaccttttggggttcaggatgctatagattgacaccctcctgcctgtttttctctgcatcccaacctggccaaggcccctcctgtggggtgcccatctgtgcctttattccggctgtgccctcgactttccagcttcccatgtttctttggttaggtttctctcccttccttctttctccttccccaatccgcctgtttcgtcagggcccagtttgtttcctcatacaccttcctcactaccccaccccacatggttgactctttccctcagctccaccagctcttcatcatgccactcatttcagaacttgagcaaaacagggcagtcaggatctgatgtctttctggtctccctaagaaaactaagctcttgagggacagcccttggcaatgctttcctatctgctgatcatggtgaccttccttaggacttccagagttcagttccttctggcagagaggttttctttctccatgccatatggatgtgactcaaatgaggggtcccacagcttttcctggctaccacttgctgtgaccttatacatgttggggtttgctcttaaagaggagagcaggaagaaaggttggtttcagaaaccaagagggtcggcagtggacgcgtacattttgtcacggagtccacagagctgagcttttgagcagactctgagaagtatcattgcttgtgttgaaagaatacaacaggatttaagtttctctttagaaattgcactgaagaaaggccgggcgcggtggctccccctgtaatcccagcgctttgggaggccgaggcggggggatcacgaggtcaagagatcgagaccatcctggccaacatggtgaaaccccgtctctaataaaaatacaaaaattagccgggcatggtgacgtgcacctgtagtcccagctactagataggctgaggcaggagaattgcttgaatccgggaggcggaggttgcagtgagccgagatcgtgccactgaactccaacctgccaatagagcgagactccgtctcaaaaaaaaaaaaaaaaaagaaagaaatagcattgaagaaaataccgcacatcagaggaaagcttattttctgcatggtgtcttttcaaagatagaatatttgaagcatgttttctagcgattgtgtggatgagggtgagctggctgaggcatcgctcaagctggggggtggtgtgtaagaagcacgtggagccacaagaggcacctcctatagtcagctaagggcttccctttctgcgcccagcttttgggtgaagggtgatttctattagacacatctgtgcttcagtcatagatgttaatagaggaagcagttttcctgctgcagattcctgaatagagttgctgaaagagtctacttctggactcaggggaagttgaaggccagtctgtgtagaaaggctgaggcaacggggaaagacctgacagctagttacatacgctctgacatagtactcccatgatggcttccagtgacacatgtgctgatagaattctaaacctctggaatttccctgctggcgacttctatggccgttgactgtacagggtaacctgatgccagatgctatgggcgtgatgagaactagagcattgcagcatggaggaaactgtgaggcaccagatcctgtgcttctgcaggccattttctgaaaacccctgttaggaaggttggatttggcgtgacttgcttgagcaagagtcctggggagagattttgaggtttaatttaacggtatatccagagctaacagtgactcaactcgtctagttctgcaagtcagatgtacacttagagtctctctgtgaagggtttgggtctgagctgtatagtatgtcaaactgccagtaagccagcccctcaccctctgatagatattcctttaatgcaccagacttcatgtttgataaatgattaatggttgaaattgtttctcttcttttgtgttttcccagttaatagatggtcactgtttccacaatgttttatactttcagctttttgtaacttaactataattacttaattttatttttttaaagcttgttgtggtctaatgagaagtatttttcagtgcataatgtttttctgagcttctgtaaatgccatcccaatgtggtttggttttgttgaacagaaaccaaaataaatttcaaaatgttaaagcaatggaaaaaaaaaaaaaaaaaaaaaaaaaaaaaa

SEQ ID NO: 897 - DNA, 2519 bp, Human
gaattcggcacgaggtgcctgcctcctagagctcattccctacgccccgactctgtcctggacagcgtgcccaccagccatggcggggccccggggcctcctcccactctgcctcctggccttctgcctggcaggcttcagcttcgtcagggggcaggtgctgttcaaaggctgtgatgtgaaaaccacgtttgtcactcatgtaccctgcacctcgtgcgcggccatcaagaagcagacgtgtccctcaggctggctgcgggagctcccggatcagataacccaggactgccgctacgaagtacagctggggggctctatggtgtccatgagcggctgcagacggaagtgccggaagcaagtggtgcagaaggcctgctgccctggctactggggttcccggtgccatgaatgccctgggggcgctgagaccccatgcaatggccacgggacctgcttggatggcatggacaggaatgggacctgtgtgtgccaggaaaacttccgcggctcagcctgccaggagtgccaagaccccaaccggttcgggcctgactgccaatcggtgtgcagctgtgtgcacggagtgtgcaaccatgggccacgtggggatggaagctgcctgtgctttgctggatacactggcccccactgtgatcaagagctgcccgtctgccaggagctgcgctgtccccagaacacccagtgctccgcagaggctcccagctgcaggtgcctgcccggctacacacagcagggcagtgaatgccgagcccccaacccctgctggccatcaccctgctcactgctggcccagtgctcggtgagccccaaggggcaggctcagtgtcactgccctgagaactaccatggcgatgggatggtgtgtctgcccaaggacccatgcactgacaaccttggtggctgccccagcaactctactttgtgtgtgtaccagaagccgggccaggccttctgcacctgccggccaggcctggtcagcatcaacagcaacgcttctgcgggctgcttcgccttctgctcccccttctcctgcgaccggtctgccacttgccaggtgaccgctgatgggaagaccagctgtgtgtgcagggaaagcgaggtgggggatgggcgtgcctgctacggacacctgctccacgaggtgcagaaggccacgcagacaggccgggtgttcctgcagctgagggtcgccgtggccatgatggaccagggctgccgggaaatccttaccacagcgggccctttcaccgtgctggtgccatccgtctcctccttctcctccaggaccatgaatgcatcccttgcccagcagctctgtagacagcacatcatcgcagggcagcacatcctggaggacacaaggacccaacaaacacgaaggtggtggacgctggccgggcaggagatcaccgtcacctttaaccaattcacgaaatactcctacaagtacaaagaccagccccagcagacgttcaacatctacaaggccaacaacatagcagctaatggcgtcttccacgtggtcactggcctgcggtggcaggccccctctgggacccctggggatcccaagagaactatcggacagatcctcgcctctaccgaggccttcagccgctttgaaaccatcctggagaactgtgggctgccctccatcctggacggacctgggcccttcacagtctttgccccaagcaatgaggctgtggacagcttgcgtgacggccgcctgatctacctcttcacagcgggtctctctaaactgcaggagttggtgcggtaccacatctacaaccacggccagctgaccgttgagaagctcatctccaagggtcggatcctcaccatggcgaaccaggtcctggctgtgaacatttctgaggaggggcgcatcctgctgggacccgagggggtcccgctgcagagggtagacgtgatggccgccaatggtgtgatccacatgctggacggcatcctgctgcccccgaccatcctgcccatcctgcccaagcactgcagcgaggagcagcacaagattgtggcgggctcctgtgtggactgccaagccctgaacaccagcacgtgtccccccaacagtgtgaagctggacatcttccccaaggagtgtgtctacatccatgacccaacggggctcaatgtgctaaagaagggctgtgccagctactgcaaccaaaccatcatggaacaaggctgctgcaaaggttttttcgggcctgactgcacgcagtgtcctgggggcttctccaacccctgctatggcaaaggcaatgtgagtcccatcctctcctggggtgaggtatggggaacacaaggactccttcaccggttggccagtgactggctgtgtgtctgggccaagcctgccactctggccttgggattctcatatctatgcagtggaaagttggatcaaattatttctcatattttaattaaaaataattagagagaaaaaaaaaaaaaaaaaactcgac

SEQ ID NO: 898 - protein, 803 aa, Human
MAGPRGLLPLCLLAFCLAGFSFVRGQVLFKGCDVKTTFVTHVPCTSCAAIKKQTCPSGWLRELPDQITQDCRYEVQLGGSMVSMSGCRRKCRKQVVQKACCPGYWGSRCHECPGGAETPCNGHGTCLDGMDRNGTCVCQENFRGSACQECQDPNRFGPDCQSVCSCVHGVCNHGPRGDGSCLCFAGYTGPHCDQELPVCQELRCPQNTQCSAEAPSCRCLPGYTQQGSECRAPNPCWPSPCSLLAQCSVSPKGQAQCHCPENYHGDGMVCLPKDPCTDNLGGCPSNSTLCVYQKPGQAFCTCRPGLVSINSNASAGCFAFCSPFSCDRSATCQVTADGKTSCVCRESEVGDGRACYGHLLHEVQKATQTGRVFLQLRVAVAMMDQGCREILTTAGPFTVLVPSVSSFSSRTMNASLAQQLCRQHIIAGQHILEDTRTQQTRRWWTLAGQEITVTFNQFTKYSYKYKDQPQQTFNIYKANNIAANGVFHVVTGLRWQAPSGTPGDPKRTIGQILASTEAFSRFETILENCGLPSILDGPGPFTVFAPSNEAVDSLRDGRLIYLFTAGLSKLQELVRYHIYNHGQLTVEKLISKGRILTMANQVLAVNISEEGRILLGPEGVPLQRVDVMAANGVIHMLDGILLPPTILPILPKHCSEEQHKIVAGSCVDCQALNTSTCPPNSVKLDIFPKECVYIHDPTGLNVLKKGCASYCNQTIMEQGCCKGFFGPDCTQCPGGFSNPCYGKGNVSPILSWGEVWGTQGLLHRLASDWLCVWAKPATLALGFSYLCSGKLDQIISHILIKNN

SEQ ID NO: 899 - DNA, 1698 bp, Human
tcggcacaggagcgaggagacccgagagcagacgcgccctggcgcccgccctgcgcagtcaccatggcgatgcatttcatcttctcagatacagcggtgcttctgtttgatttctggagtgtccacagtcctgctggcatggccctttcggtgttggtgctcctgcttctggctgtactgtatgaaggcatcaaggttggcaaagccaagctgctcaaccaggtactggtgaacctgccaacctccatcagccagcagaccatcgcagagacagacggggactctgcaggctcagattcattccctgttggcagaacccaccacaggtggtacttgtgtcactttggccagtctctaatccatgtcatccaggtggtcatcggctacttcatcatgctggccgtaatgtcctacaacacctggattttccttggtgtggtcttgggctctgctgtgggctactacctagcttacccacttctcagcacagcttagatggtgaggaacgtgcaggcactgaggctggagggacatggagccccctcttccagacactatacttccaactgccctttcttctgatggctattcctccaccttattcccagcccctggaaactttgagctgaagccagcacttgctccctggagttcggaagccattgcagcaaccttccttctcagccagcctacgtagggcccaggcatggtcttgtgtcttaagacagctgctgtgaccaaagggagaatggagataacaggggtggcagggttactgagcccatgacaatgcttctctgtgactcaaaccaggaatttccaaagatttcaagccagggagaagggttcttggtgatgcagggcatggaacctggacaccctcagctctcctgctttgtgccttatctacaggagcatcgcccattggacttcctgacctcttctgtctttgagggacagagaccaagctagatcctttttctcacctttctgcctttggaacacatgaagatcatctcgtctatggatcatgttgacaaactaagttttttttatttttcccattgaactcctagttggcaattttgcacattcatacaaaaaaatttttaatgaaatgatttcattgattcatgatggatggcagaaactgctgagacctatttccctttcttggggagagaataagtgacagctgattaaaggcagagacacaggactgctttcaggctcctggtttattctctgattgactgagctccttccaccagaaggcactgcctgcaggaagaagatgatctgatggccgtgggtgtctgggaagctcttcgtggcctcaatgccctcctttatcctcatctttcttctatgcagaacaaaaagctgcatctaataatgttcaatacttaatattctctatttattacttactgcttactcgtaatgatctagtggggaaacatgattcattcacttaaaatactgattaagccatgggcaggtactgactgaagatgcaatccaaccaaagccattacattttttgagttagatgggactctctggatagttgaacctcttcactttataaaaaaggaaagagagaaaatcactgctgtatactaaatacctcacagattagatgaaaagatggttgtaagctttgggaattaaaaacaaatacattttagtaaatat

SEQ ID NO: 900 - protein, 143 aa, Human
MAMHFIFSDTAVLLFDFWSVHSPAGMALSVLVLLLLAVLYEGIKVGKAKLLNQVLVNLPTSISQQTIAETDGDSAGSDSFPVGRTHHRWYLCHFGQSLIHVIQVVIGYFIMLAVMSYNTWIFLGVVLGSAVGYYLAYPLLSTA

SEQ ID NO: 901 - DNA, 3302 bp, Human
cggtgctgccgccgttgccgggagccgcggagacaagtcattacgttttcatttctcacaactgggctgagcacaactgaaccatgggggaacacagtccagacaacaacatcatctactttgaggcagaggaagatgagctgacccccgatgataaaatgctcaggtttgtggataaaaacggactggtgccttcctcatctggaactgtttatgataggaccactgttcttattgagcaggaccctggcactttggaggatgaagatgacgacggacagtgcggagaacacttgccttttctagtagggggtgaagagggctttcacctgatagatcatgaagcaatgtcccagggttatgtgcagcacattatctcaccagatcagattcatttgacaataaaccctggttccacacccatgccaagaaatattgaaggtgcaaccctcactctgcagtcggaatgtccggaaacaaaacgtaaagaagtaaagcggtaccaatgtacctttgagggctgtccccgcacctacagcacagcaggcaacctgcgaacccaccagaagactcaccgaggagagtacacctttgtctgtaatcaggagggctgtggcaaagccttccttacctctcacagcctcaggatccacgtgcgagtgcacacgaaggagaagccatttgagtgtgacgtgcagggctgtgagaaggcattcaacacactgtacaggctgaaagcacatcagaggcttcacacagggaaaacgtttaactgtgaatctgaaggctgcagcaaatacttcaccacactcagtgatctgaggaagcacattcgaactcatacaggggaaaagccatttcggtgcgatcacgatggctgtggaaaagcatttgcagcaagccaccaccttaaaactcacgttcgtacacatactggtgaaagacccttcttctgccccagtaatggctgtgagaaaacattcagcactcaatacagtctcaaaagtcacatgaaaggtcatgataacaaaggacactcatacaatgcacttccacaacacaatggatcagaggatacaaatcactcactttgtctaagtgacttgagccttctgtccacagattctgaattgcgagaaaattccagtacgacccagggccaggacctcagcacaatttcaccagcaatcatctttgaatcaatgttccagaattcagatgatacggcaattcaggaagatcctcaacagacagcttccttgactgaaagttttaatggtgatgcagagtcagtcagtgatgttccgccatccacaggaaattcagcatctttatctcttccacttgtactgcaacctggcctctccgagccaccccagcctctactacctgcctcagctccgtctgctcctccgcctgctccctccctaggacctggctcccagcaagctgcatttggcaacccccctgctctcttacaacctccagaagtgcctgttccccacagcacacagtttgctgctaatcatcaagagtttcttccgcacccccaggcaccgcagcccattgtaccaggactttctgttgttgctggggcttctgcatcagcagcggcagtggcatcagctgtggcagcaccagccccaccacaaagtactactgagcccctgccagccatggtccagactctgcccctgggtgccaactctgtcctaactaataatcccacaataaccatcaccccaactcccaacacagctatcctgcagtccagcctagtcatgggagaacagaacttacaatggatattaaatggtgccaccagttctccacaaaaccaagaacaaattcagcaagcatctaaagttgagaaggtgttttttaccactgcagtaccagtagccagtagcccagggagctctgtccagcagattggcctcagtgttcctgtgatcatcatcaaacaagaagaggcatgtcagtgtcagtgtgcatgccgggactctgcaaaggagcgggcatccagcaggagaaagggctgctcctccccaccccctccagagccgagcccccaggctcctgatgggcccagcctgcagctcccagcgcagactttctcttcagcccctgttcccgggtcatcatcctctaccttgccctcctcctgtgagcaaagccgacaagcagagactccttcagaccctcagacagaaacattaagtgccatggatgtgtcagagtttctatccctccagagcctggacaccccgtccaatctgattcccattgaagcactactgcagggggaggaggagatgggcctcaccagcagcttctccaagtgaagggcccatgtgtgctcacctctgggaaaagcgggtgagcaggaggcatgaggtacaatgcctgccatcatgggtcagaaatttgaaggatgaagaaatctactgtttgaaatcctcacctttcagacgtattttctttattcacatcccaggagcatccattttaaggaactattctttggaaaaaaacaaaaaacaaaaaaaacaacaaaaaaagctaagttataagtgaactgtttggctgcactgtatgtcacttttgcttgttgtcatgtgaacttggaaactaaggttactcgtgtgcataaaaattctaaatgaaagggtgtggtttccatcaatctgatgctgcccatcgcttgcactggggtctttgtggatcgggcaggagttttcagtgtgttgggtgttgctccttcctatgtgtcttttgaatctgaggctgacatttgcttggaaggccagacccttgctccatcagagagggcagtggcaaaggccagtgaggcagctgtgagttggacagggttcaggtgagatggtgttgtcatttgtgcttagtgttggtggtgctcagggtggataacacgggtcgttctgcagcccgcttcagcacaaataggcagcttaaggcctggctcacaggctgtggggttgatctggctctgcagaggccctaggcagcttgttgactgctgtctgttgatgacgtgtgtgcaaagcaggctctagcaacatgatcactgtccttgccttcctggttctttctctcggttggttgccagggcttgcagatcgcagtgaattttccttggggaacatcgctgttttgtcctagagtgaacttgtggcttatggccagtgctgtttggtggtctgccttctttttaatggtattttcttcctcagagcagaagggctgcattttgcttatcagaagaaggtgcagatttaagg

SEQ ID NO: 902 - protein, 753 aa, Human
MGEHSPDNNIIYFEAEEDELTPDDKMLRFVDKNGLVPSSSGTVYDRTTVLIEQDPGTLEDEDDDGQCGEHLPFLVGGEEGFHLIDHEAMSQGYVQHIISPDQIHLTINPGSTPMPRNIEGATLTLQSECPETKRKEVKRYQCTFEGCPRTYSTAGNLRTHQKTHRGEYTFVCNQEGCGKAFLTSHSLRIHVRVHTKEKPFECDVQGCEKAFNTLYRLKAHQRLHTGKTFNCESEGCSKYFTTLSDLRKHIRTHTGEKPFRCDHDGCGKAFAASHHLKTHVRTHTGERPFFCPSNGCEKTFSTQYSLKSHMKGHDNKGHSYNALPQHNGSEDTNHSLCLSDLSLLSTDSELRENSSTTQGQDLSTISPAIIFESMFQNSDDTAIQEDPQQTASLTESFNGDAESVSDVPPSTGNSASLSLPLVLQPGLSEPPQPLLPASAPSAPPPAPSLGPGSQQAAFGNPPALLQPPEVPVPHSTQFAANHQEFLPHPQAPQPIVPGLSVVAGASASAAAVASAVAAPAPPQSTTEPLPAMVQTLPLGANSVLTNNPTITITPTPNTAILQSSLVMGEQNLQWILNGATSSPQNQEQIQQASKVEKVFFTTAVPVASSPGSSVQQIGLSVPVIIIKQEEACQCQCACRDSAKERASSRRKGCSSPPPPEPSPQAPDGPSLQLPAQTFSSAPVPGSSSSTLPSSCEQSRQAETPSDPQTETLSAMDVSEFLSLQSLDTPSNLIPIEALLQGEEEMGLTSSFSK

SEQ ID NO: 903 - DNA, 1926 bp, Human
cgcaggcctggcgaggcggcggcgggcggaggctgggccggaggggtggggacggcgaggaggtggaggccggcgctccgctccgctccagctcggtttcatgtcccgccaggcgaaggatgacttcctgcggcactacacagtgtcggaccccaggactcaccccaagggctacaccgagtacaaagtaaccgcgcagttcatctcaaagaaggacccagaggatgtcaaagaggtggtggtctggaagcggtacagcgacttccgcaagctgcatggagacctggcctacacccaccgcaacctcttccgccgcctcgaggagttccctgctttcccccgggcccaggtgtttggccggtttgaagcctcagtgatcgaggagcggcgaaagggggcagaggacctgcttcgcttcactgtgcacatacctgcgctcaacaacagcccccagctcaaggagttcttccggggtggggaggtgacccgacccttggaggtgtccagggacctacacatcctgccaccccctctgatccccaccccgccccctgatgacccccggctatcccaactgctccctgcagaaaggaggggcctcgaggaattggaggtgccagtggaccccccaccatccagccctgcccaggaggccctggatctcctctttaactgtgagagcaccgaggaggcatctggttcccctgcccgaggccccctcaccgaggctgagcttgccctcttcgaccccttctccaaggaagaaggcgcagcccccagccccacccatgtggctgagctggcaacgatggaggtggagtctgcaaggctggaccaggaaccctgggagccaggagggcaggaggaggaagaggatggggaaggagggcccacccctgcctacctaagccaggccacagagctcatcacccaggccctgcgggatgagaaggcaggcgcttacgctgctgcactccagggctatcgagacggcgtgcacgtcttgcttcagggagtccccagtgacccgttgcctgcccgccaggaaggtgtgaagaagaaggcagctgagtacctgaagcgggcagaggagatcctgcgcctgcacctgtctcaactcccaccctaacagggagtgggccattccctgggactctcgctcctgcactgccagccccttctcctctccccagggcctggccctacctcctggtcttgtaattacaggagccatttctgtaggtaactggaccaagaatgagaaaaataatgaattcttagctccctgattacacctgccaccttggaatccaggactcacacttctgaccctgcctgtctttttggggtttttttgagttggagtctcgctgtgtcgcccagactggagtgcagtggtgggatcgcggctcactgcaacctccacctcccaggttcaagcagttctcctgtctcagcctccccagtagctgagattgcaggcacatgccaccacgcccagctaatattttgtattttcagtagggacggggttacaccatgttggccaggctggtctcgaactcctgacctcaagtgatccacccgcctcagtctcccaaagtgctgagattacaggcatgagtcactacgcccggcccatgtctgtctgtcttgatgtgtgagcagcagctgtggtcattaaaccattagtttacccctctagaactggggtctgcaaactcccacctgcagccaaatctggcccacctcctttttaatgtaagggctgtgagagtggtttttactttttttaatgattaaaaaaatcaaaataatattctgtgacaatgacaggtgaaatttatatgtgacaagtgaaaattatatgaaatttaagagtccataaataaaatttgttggaacacaaaaaaaaaaaaaaaaaaa

SEQ ID NO: 904 - DNA, 4740 bp, Human
tggcttccttgtggttcctcagtggtgcctgcaacccctggttcacctccttccaggttctggctccttccagccatggctctcagagtccttctgttaacagccttgaccttatgtcatgggttcaacttggacactgaaaacgcaatgaccttccaagagaacgcaaggggcttcgggcagagcgtggtccagcttcagggatccagggtggtggttggagccccccaggagatagtggctgccaaccaaaggggcagcctctaccagtgcgactacagcacaggctcatgcgagcccatccgcctgcaggtccccgtggaggccgtgaacatgtccctgggcctgtccctggcagccaccaccagcccccctcagctgctggcctgtggtcccaccgtgcaccagacttgcagtgagaacacgtatgtgaaagggctctgcttcctgtttggatccaacctacggcagcagccccagaagttcccagaggccctccgagggtgtcctcaagaggatagtgacattgccttcttgattgatggctctggtagcatcatcccacatgactttcggcggatgaaggagtttgtctcaactgtgatggagcaattaaaaaagtccaaaaccttgttctctttgatgcagtactctgaagaattccggattcactttaccttcaaagagttccagaacaaccctaacccaagatcactggtgaagccaataacgcagctgcttgggcggacacacacggccacgggcatccgcaaagtggtacgagagctgtttaacatcaccaacggagcccgaaagaatgcctttaagatcctagttgtcatcacggatggagaaaagtttggcgatcccttgggatatgaggatgtcatccctgaggcagacagagagggagtcattcgctacgtcattggggtgggagatgccttccgcagtgagaaatcccgccaagagcttaataccatcgcatccaagccgcctcgtgatcacgtgttccaggtgaataactttgaggctctgaagaccattcagaaccagcttcgggagaagatctttgcgatcgagggtactcagacaggaagtagcagctcctttgagcatgagatgtctcaggaaggcttcagcgctgccatcacctctaatggccccttgctgagcactgtggggagctatgactgggctggtggagtctttctatatacatcaaaggagaaaagcaccttcatcaacatgaccagagtggattcagacatgaatgatgcttacttgggttatgctgccgccatcatcttacggaaccgggtgcaaagcctggttctgggggcacctcgatatcagcacatcggcctggtagcgatgttcaggcagaacactggcatgtgggagtccaacgctaatgtcaagggcacccagatcggcgcctacttcggggcctccctctgctccgtggacgtggacagcaacggcagcaccgacctggtcctcatcggggccccccattactacgagcagacccgagggggccaggtgtccgtgtgccccttgcccagggggagggctcggtggcagtgtgatgctgttctctacggggagcagggccaaccctggggccgctttggggcagccctaacagtgctgggggacgtaaatggggacaagctgacggacgtggccattggggccccaggagaggaggacaaccggggtgctgtttacctgtttcacggaacctcaggatctggcatcagcccctcccatagccagcggatagcaggctccaagctctctcccaggctccagtattttggtcagtcactgagtgggggccaggacctcacaatggatggactggtagacctgactgtaggagcccaggggcacgtgctgctgctcaggtcccagccagtactgagagtcaaggcaatcatggagttcaatcccagggaagtggcaaggaatgtatttgagtgtaatgatcaggtggtgaaaggcaaggaagccggagaggtcagagtctgcctccatgtccagaagagcacacgggatcggctaagagaaggacagatccagagtgttgtgacttatgacctggctctggactccggccgcccacattcccgcgccgtcttcaatgagacaaagaacagcacacgcagacagacacaggtcttggggctgacccagacttgtgagaccctgaaactacagttgccgaattgcatcgaggacccagtgagccccattgtgctgcgcctgaacttctctctggtgggaacgccattgtctgctttcgggaacctccggccagtgctggcggaggatgctcagagactcttcacagccttgtttccctttgagaagaattgtggcaatgacaacatctgccaggatgacctcagcatcaccttcagtttcatgagcctggactgcctcgtggtgggtgggccccgggagttcaacgtgacagtgactgtgagaaatgatggtgaggactcctacaggacacaggtcaccttcttcttcccgcttgacctgtcctaccggaaggtgtccacactccagaaccagcgctcacagcgatcctggcgcctggcctgtgagtctgcctcctccaccgaagtgtctggggccttgaagagcaccagctgcagcataaaccaccccatcttcccggaaaactcagaggtcacctttaatatcacgtttgatgtagactctaaggcttcccttggaaacaaactgctcctcaaggccaatgtgaccagtgagaacaacatgcccagaaccaacaaaaccgaattccaactggagctgccggtgaaatatgctgtctacatggtggtcaccagccatggggtctccactaaatatctcaacttcacggcctcagagaataccagtcgggtcatgcagcatcaatatcaggtcagcaacctggggcagaggagcccccccatcagcctggtgttcttggtgcccgtccggctgaaccagactgtcatatgggaccgcccccaggtcaccttctccgagaacctctcgagtacgtgccacaccaaggagcgcttgccctctcactccgactttctggctgagcttcggaaggcccccgtggtgaactgctccatcgctgtctgccagagaatccagtgtgacatcccgttctttggcatccaggaagaattcaatgctaccctcaaaggcaacctctcgtttgactggtacatcaagacctcgcataaccacctcctgatcgtgagcacagctgagatcttgtttaacgattccgtgttcaccctgctgccgggacagggggcgtttgtgaggtcccagacggagaccaaagtggagccgttcgaggtccccaaccccctgccgctcatcgtgggcagctctgtcgggggactgctgctcctggccctcatcaccgccgcgctgtacaagctcggcttcttcaagcggcaatacaaggacatgatgagtgaagggggtcccccgggggccgaaccccagtagcggctccttcccgacagagctgcctctcggtggccagcaggactctgcccagaccacacgagcccccaggctgctggacacgtcggacagcgaagtatccccgacaggacgggcttgggcttccatttgtgtgtgtgcaagtgtgtatgtgcgtgtgtgcgagtgtgtgcaagtgtctgtgtgcaagtgtgtgcacgtgtgcgtgtgcgtgcatgtgcactcgcacgcccatgtgtgagtgtgtgcaagtatgtgagtgtgtccagtgtgtgtgcgtgtgtccatgtgtgtgcagtgtgtgcatgtgtgcgagtgtgtgcatgtgtgtgctcaggggctgtggctcacgtgtgtgactcagagtgtctctggcgtgtgggtaggtgacggcagcgtagcctctccggcagaagggaactgcctgggctcccttgtgcgtgggtaagccgctgctgggttttcctccgggagaggggacggtcaatcctgtgggtgaagagagagggaaacacagcagcatctctccactgaaagaagtgggacttcccgtcgcctgcgagcctgcggcctgctggagcctgcgcagcttggatggatactccatgagaaaagccgtgggtggaaccaggagcctcctccacaccagcgctgatgcccaataaagatgcccactgaggaatcatgaagcttcctttctggattcatttattatttcaatgtgactttaattttttggatggataagcctgtctatggtacaaaaatcacaaggcattcaagtgtacagtgaaaagtctccctttccagatattcaagtcacctccttaaaggtagtcaagattgtgttttgaggtttccttcagacagattccaggcgatgtgcaagtgtatgcacgtgtgcacacaccacacacatacacacacacaagcttttttacacaaatggtagcatactttatattggtctgtatcttgctttttttcaccaatatttctcagacatcggttcatattaagacataaattactttttcattcttttataccgctgcatagtattccattgtgtgagtgtaccataatgtatttaaccagtcttcttttgatatactattttcatctcttgttattgcatctgctgagttaataaatcaaatatatgtcaaaaaaaaaaaaaaaaaaaaaaaaaaaaaaaaaaaaaaaaat

SEQ ID NO: 905 - protein, 1152 aa, Human
MALRVLLLTALTLCHGFNLDTENAMTFQENARGFGQSVVQLQGSRVVVGAPQEIVAANQRGSLYQCDYSTGSCEPIRLQVPVEAVNMSLGLSLAATTSPPQLLACGPTVHQTCSENTYVKGLCFLFGSNLRQQPQKFPEALRGCPQEDSDIAFLIDGSGSIIPHDFRRMKEFVSTVMEQLKKSKTLFSLMQYSEEFRIHFTFKEFQNNPNPRSLVKPITQLLGRTHTATGIRKVVRELFNITNGARKNAFKILVVITDGEKFGDPLGYEDVIPEADREGVIRYVIGVGDAFRSEKSRQELNTIASKPPRDHVFQVNNFEALKTIQNQLREKIFAIEGTQTGSSSSFEHEMSQEGFSAAITSNGPLLSTVGSYDWAGGVFLYTSKEKSTFINMTRVDSDMNDAYLGYAAAIILRNRVQSLVLGAPRYQHIGLVAMFRQNTGMWESNANVKGTQIGAYFGASLCSVDVDSNGSTDLVLIGAPHYYEQTRGGQVSVCPLPRGRARWQCDAVLYGEQGQPWGRFGAALTVLGDVNGDKLTDVAIGAPGEEDNRGAVYLFHGTSGSGISPSHSQRIAGSKLSPRLQYFGQSLSGGQDLTMDGLVDLTVGAQGHVLLLRSQPVLRVKAIMEFNPREVARNVFECNDQVVKGKEAGEVRVCLHVQKSTRDRLREGQIQSVVTYDLALDSGRPHSRAVFNETKNSTRRQTQVLGLTQTCETLKLQLPNCIEDPVSPIVLRLNFSLVGTPLSAFGNLRPVLAEDAQRLFTALFPFEKNCGNDNICQDDLSITFSFMSLDCLVVGGPREFNVTVTVRNDGEDSYRTQVTFFFPLDLSYRKVSTLQNQRSQRSWRLACESASSTEVSGALKSTSCSINHPIFPENSEVTFNITFDVDSKASLGNKLLLKANVTSENNMPRTNKTEFQLELPVKYAVYMVVTSHGVSTKYLNFTASENTSRVMQHQYQVSNLGQRSPPISLVFLVPVRLNQTVIWDRPQVTFSENLSSTCHTKERLPSHSDFLAELRKAPVVNCSIAVCQRIQCDIPFFGIQEEFNATLKGNLSFDWYIKTSHNHLLIVSTAEILFNDSVFTLLPGQGAFVRSQTETKVEPFEVPNPLPLIVGSSVGGLLLLALITAALYKLGFFKRQYKDMMSEGGPPGAEPQ

SEQ ID NO: 906 - DNA, 2775 bp, Human
ggactgccccgccctggtccagtgattgatcagcagtgattactgaggctttaatggtccgcttggatgggaattaattctgggatggataaataatgcatcgaggtttatgtagtccaaggcgagccgtccgtccggagccaggagaggtagccgagggagcctgacgggtgacgccagcggccacggggccccgaacgagcaggacatgaggggcgactaggcgcgaggacgagcaaaagcaagtggatgacagcatgaacggccctgcggggctggccggacggctgcaagaacatgctgagcccaaagatcaggcaggccaggagggcccgctccaaaagcctagtgatgggggagcagagccggagccctgggcggatgccgtgccctcacaggctgggccccgtgctgaaggcgggctggctgaagaagcagaggagcatcatgaagaactggcagcagcgctggtttgtgctgcgtggggatcagcttttctactacaaggacaaagatgagatcaagccccagggatttatttctctacaagggacacaggtgactgaacttcctcctggccccgaggacccagggaagcacctctttgagatcagcccaggtggtgccggggagcgggagaaggtgccggccaaccccgaggcgctcctgctcatggccagctcccagcgtgacatggaggactgggtgcaggccatccgccgagtcatctgggccccgctgggcggagggatctttgggcagcgcctagaggaaacagtccaccacgagcggaagtatggcccccgcctggcgcccctgctggtggagcagtgtgtggacttcatccgggagcgcgggctcactgaggaggggctgttccgcatgccaggccaggccaacctggtgagggacctgcaggattccttcgactgtggggagaagccactgtttgacagcacaacagacgtgcacacggtggcctccctgctgaagctgtacctgcgggagctccccgagcccgtggtccccttcgccaggtacgaggacttcctcagctgcgcccagctgctcaccaaggacgagggggagggcactctggagttggctaaacaagtgagcaaccttcctcaggcaaattacaacctgctcagatacatctgcaagtttctggatgaagttcaggcatactcaaatgtcaacaagatgagtgtccagaatctggcaaccgtttttggacctaacattctgcggccacaggtagaggacccagtaaccatcatggaaggcacttccctcgtccagcacctgatgaccgtcctcatccgcaaacacagccagctcttcacggcaccggtcccggaagggcccacctccccgcgcgggggcctgcaatgcgcagtggggtggggctccgaggaggtcaccagggacagccaaggagagcccggcggccccggcctgcccgcgcacaggacctcttccctggacggggcggccgtggcggtgctctccagaacagcccccacggggccggggagccggtgcagccctgggaagaaggtgcagaccctgcccagttggaagtcctccttccggcagccgaggtccctatcgggaagcccgaaggggggcggctcatccctggaggtgcccatcatctcctccggcgggaactggcttatgaacgggctgtcctccctgcgcggacaccgccgggcctcgtcgggagaccggctcaaggactcgggctccgtgcagagactctccacctacgacaatgtgcccgcgccgggcctggtccccggcatacccagcgtggccagtatggcgtggtccggggcctcgtccagcgagtcgtcggtggggggctcactcagcagctgcacggcctgccgcgccagcgactcgtctgcccgcagttccctgcacaccgactgggccctggagccctccccgctccccagcagcagcgaggaccccaagtccctggacctggaccacagcatggacgaggcgggcgcgggtgccagcaacagcgagcccagcgagccggacagccccacccgggaacacgcgcgccgctccgaggccttacaggggctggtcactgagctcagggccgagctgtgccgccagcggactgagtacgagaggagtgtgaaaagaatcgaagaagggagtgctgacctgagaaaacgaatgtcccggttagaagaagaactggaccaggaaaagaaaaaatacatcatgctggaaataaagctgcggaactctgaacgggcgcgggaggatgcggagaggaggaaccagctgttgcagagggaaatggaggagtttttttcgaccctaggaagcttgactgttggggcaaaaggtgccagggccccaaagtaaaaggaatggcagagctcacttctgtaccacgtctgctggtctccagccttgtatggagttagaagcgtctgtatctctggagcagccaggcgctctggagccagctggagagagagagatcctgatacctctgtggggactgtggggacttttgggaccccacacactccaggtgggatcagatgctgctccaaccatgcagttcctggtgagggtcagaaggggacggtaccaagagtagcgcttagcccttacccaggaaatatccttcatggccacagaaatggagggcgcccaggatccaggcagccaccgggaacagtcagctttctttattaaatgtgctcacaaagcaaaaaaaaaaaaaaaaaaaaaaaaaaa

SEQ ID NO: 907 - DNA, 1975 bp, Human
cttgcctgcaaacctttacttctgaaatgacttccacggctgggacgggaaccttccacccacagctatgcctctgattggtgaatggtgaaggtgcctgtctaacttttctgtaaaaagaaccagctgcctccaggcagccagccctcaagcatcacttacaggaccagagggacaagacatgactgtgatgaggagctgctttcgccaatttaacaccaagaagaattgaggctgcttgggaggaaggccaggaggaacacgagactgagagatgaattttcaacagaggctgcaaagcctgtggactttagccagacccttctgccctcctttgctggcgacagcctctcaaatgcagatggttgtgctcccttgcctgggttttaccctgcttctctggagccaggtatcaggggcccagggccaagaattccactttgggccctgccaagtgaagggggttgttccccagaaactgtgggaagccttctgggctgtgaaagacactatgcaagctcaggataacatcacgagtgcccggctgctgcagcaggaggttctgcagaacgtctcggatgctgagagctgttaccttgtccacaccctgctggagttctacttgaaaactgttttcaaaaactaccacaatagaacagttgaagtcaggactctgaagtcattctctactctggccaacaactttgttctcatcgtgtcacaactgcaacccagtcaagaaaatgagatgttttccatcagagacagtgcacacaggcggtttctgctattccggagagcattcaaacagttggacgtagaagcagctctgaccaaagcccttggggaagtggacattcttctgacctggatgcagaaattctacaagctctgaatgtctagaccaggacctccctccccctggcactggtttgttccctgtgtcatttcaaacagtctcccttcctatgctgttcactggacacttcacgcccttggccatgggtcccattcttggcccaggattattgtcaaagaagtcattctttaagcagcgccagtgacagtcagggaaggtgcctctggatgctgtgaagagtctacagagaagattcttgtatttattacaactctatttaattaatgtcagtatttcaactgaagttctatttatttgtgagactgtaagttacatgaaggcagcagaatattgtgccccatgcttctttacccctcacaatccttgccacagtgtggggcagtggatgggtgcttagtaagtacttaataaactgtggtgctttttttggcctgtctttggattgttaaaaaacagagagggatgcttggatgtaaaactgaacttcagagcatgaaaatcacactgtcttctgatatctgcagggacagagcattggggtgggggtaaggtgcatctgtttgaaaagtaaacgataaaatgtggattaaagtgcccagcacaaagcagatcctcaataaacatttcatttcccacccacactcgccagctcaccccatcatccctttcccttggtgccctccttttttttttatcctagtcattcttccctaatcttccacttgagtgtcaagctgaccttgctgatggtgacattgcacctggatgtactatccaatctgtgatgacattccctgctaataaaagacaacataactcaagtctggcagactttcttctctatttctggatgaatgcccagtgagactgtgttgtacagctagaaaaggccttcttcccaatagcaaggctgtgcatctagcctcaagctctggctgaactttgtggtcgacatcaatctaaagatacagtgtctgactataaccttgttccaaaaacctaggcaaagagtatatgtaggaggtgggatatcacttccatgacataagtgctattgcagagccgtggccacccaggaactcctgactgctttcc

SEQ ID NO: 908 - DNA, 2395 bp, Human
gccgccgtcggcgcgctgggtgcgggaagggggctctggatttcggtccctcccctttttcctctgagtctcggaacgctccagctctcagaccctcttcctcccaggtaaaggccgggagaggagggcgcatctcttttccaggcaccccaccatgggcaatgcctccaatgactcccagtctgaggactgcgagacgcgacagtggcttcccccaggcgaaagcccagccatcagctccgtcatgttctcggccggggtgctggggaacctcatagcactggcgctgctggcgcgccgctggcggggggacgtggggtgcagcgccggccgcaggagctccctctccttgttccacgtgctggtgaccgagctggtgttcaccgacctgctcgggacctgcctcatcagcccagtggtactggcttcgtacgcgcggaaccagaccctggtggcactggcgcccgagagccgcgcgtgcacctacttcgctttcgccatgaccttcttcagcctggccacgatgctcatgctcttcgccatggccctggagcgctacctctcgatcgggcacccctacttctaccagcgccgcgtctcgcgctccgggggcctggccgtgctgcctgtcatctatgcagtctccctgctcttctgctcgctgccgctgctggactatgggcagtacgtccagtactgccccgggacctggtgcttcatccggcacgggcggaccgcttacctgcagctgtacgccaccctgctgctgcttctcattgtctcggtgctcgcctgcaacttcagtgtcattctcaacctcatccgcatgcaccgccgaagccggagaagccgctgcggaccttccctgggcagtggccggggcggccccggggcccgcaggagaggggaaagggtgtccatggcggaggagacggaccacctcattctcctggctatcatgaccatcaccttcgccgtctgctccttgcctttcacgatttttgcatatatgaatgaaacctcttcccgaaaggaaaaatgggacctccaagctcttaggtttttatcaattaattcaataattgacccttgggtctttgccatccttaggcctcctgttctgagactaatgcgttcagtcctctgttgtcggatttcattaagaacacaagatgcaacacaaacttcctgttctacacagtcagatgccagtaaacaggctgacctttgaggtcagtagtttaaaagttcttagttatatagcatctggaagatcattttgaaattgttccttggagaaatgaaaacagtgtgtaaacaaaatgaagctgccctaataaaaaggagtatacaaacatttaagctgtggtcaaggctacagatgtgctgacaaggcacttcatgtaaagtgtcagaaggagctacaaaacctaccctcagtgagcatggtacttggcctttggaggaacaatcggctgcattgaagatccagctgcctattgatttaagctttcctgttgaatgacaaagtatgtggttttgtaatttgtttgaaaccccaaacagtgactgtactttctattttaatcttgctactaccgttatacacatatagtgtacagccagaccagattaaacttcatatgtaatctctaggaagtcaatatgtggaagcaaccaagcctgctgtcttgtgatcacttagcgaaccctttatttgaacaatgaagttgaaaatcataggcaccttttactgtgatgtttgtgtatgtgggagtactctcatcactacagtattactcttacaagagtggactcagtgggttaacatcagttttgtttactcatcctccaggaactgcaggtcaagttgtcaggttatttattttataatgtccatatgctaatagtgatcaagaagactttaggaatggttctctcaacaagaaataatagaaatgtctcaaggcagttaattctcattaatactcttattatcctatttctgggggaggatgtacgtggccatgtatgaagccaaatattaggcttaaaaactgaaaaatctggttcattcttcagatatactggaacccttttaaagttgatattggggccatgagtaaaatagattttataagatgactgtgttgtaccaaaattcatctgtctatattttatttagggaacatggtttgactcatcttatatgggaaaccatgtagcagtgagtcatatcttaatatatttctaaatgtttggcatgtaaatgtaaactcagcatcaaaatatttcagtgaatttgcactgtttaatcatagttactgtgtaaactcatctgaaatgttacaaaaataaactataaaacaaaaatttgaaaaaaaaaaaaaaaaaa

SEQ ID NO: 909 - DNA, 2452 bp, Human
cgcaagaatgcatacaaactccagggctgctctctcctggagagggagggaggggatttaaaaacctgcagcaacatgggggaggaggctgtttgtccttctctctctggggaagtaactcgctcaaactgccttccttgctgagctgcttcgcgtagctttgaggaaggtctagtgaaattggtctttccattacatctggatgtactaccagagagttctgctgctgttgttttttttagcttttctttctttgagtctttaaagggcaattgtcgacactctgcaaacataccgatttgttgtctgcccactttggagtcttcaatctgggcagtaactatttaccctttttcctgctagcctgtccccctctctggattgaagtcacctgctaagacaatggactaccgaccagactcccggaaatcatgttggtaggatcccagtctttttcgcctggagggcccaatgggatcattagaagccagtcctttgcgggtttcagcggcctccaggaaaggcgatccaggtgtaactccttcattgaaaattcctccgctctcaagaagcctcaggccaaactgaagaaaatgcacaatttaggccacaaaaacaacaatccccccaaagagcctcagcctaaaagggtggaagaagtctacagggccttgaaaaatggacttgatgaatatctggaggttcaccagacggagctggacaagttgacagctcagttaaaagatatgaaaagaaactctcgcctgggtgtactgtatgacctagacaagcaaattaaaacaattgaaagatacatgagacgcctggagtttcatataagtaaggtagatgaactctatgaagcttattgtatccagcgacgcctccaggatggtgccagcaaaatgaagcaagccttcgcaacatcccctgccagcaaagctgcccgggagagtctgacagagatcaatcggagcttcaaggagtacacagagaatatgtgcaccattgaagtggagctagagaatctgctgggagaattctccatcaagatgaaaggtctggctggctttgcacgcctctgtcctggagatcaatatgaaattttcatgaagtatggccggcagcggtggaaactgaaaggcaaaatagaagtaaatggcaagcagagctgggatggagaagaaacagtttttctgcccctgatagttgggttcatctccatcaaggtcacggagctcaaagggctagcaactcacatcctggtaggtagcgtgacctgtgagaccaaagagctgtttgcagcccgacctcaggtagtggctgtcgacatcaatgaccttggtaccatcaaactgaacctggaaatcacctggtatccatttgacgtggaggacatgaccgcatcctcaggcgctgggaacaaggcagcagcccttcagaggagaatgtccatgtacagccagggtaccccggaaacgcccaccttcaaagaccactccttcttttcaaatctacctgatgacatctttgaaaatggaaaggcagccgaggagaaaatgccactgtcgctcagcttcagtgacctgcccaacggggactgcgccctcacctcccactcaacaggctccccttccaactcaacaaatccagaaattaccatcacccctgcggagtttaacctcagcagcttggcctcccagaatgagggtatggatgacaccagctcagcatcttccaggaactccctgggagaaggccaagagccaaagtcacacctgaaggaggaagacccagaggagcccagaaaacctgcctcggccccatctgaggcttgccgccgacagtcctcaggtgctggggctgagcacctgttccttgagaatgatgttgcagaagcacttctgcaagagtctgaggaggcctctgagctcaagcctgtggaactggacacttcggaaggaaacatcacaaagcagctggtcaagaggctcacatctgcagaggtgccaatggccacagacaggctgctctctgagggttctgttggtggagaatctgaaggctgcagatcctttctagatggaagcttagaggatgcttttaatgggcttttacttgcattagaaccacataaagagcagtataaagagtttcaggatctgaaccaagaagtcatgaatttggatgatattctaaaaaagtagagaagatcctctaatggatcccagtgtgcccatccctcaacctcctcagtgatcaactcatggccaatcttgtttcctattcttcaacctgctgacttccctctggattcttctgcaaccagtcccagatattgtgccattttatccatggttgtacttcttttttggatataaagatttttaaatgcattttttaaatgctaacaaaaaataaaaacttgaaacaaaaaaaaaaaaaaaaaaaa

SEQ ID NO: 910 - protein, 591 aa, Human
MLVGSQSFSPGGPNGIIRSQSFAGFSGLQERRSRCNSFIENSSALKKPQAKLKKMHNLGHKNNNPPKEPQPKRVEEVYRALKNGLDEYLEVHQTELDKLTAQLKDMKRNSRLGVLYDLDKQIKTIERYMRRLEFHISKVDELYEAYCIQRRLQDGASKMKQAFATSPASKAARESLTEINRSFKEYTENMCTIEVELENLLGEFSIKMKGLAGFARLCPGDQYEIFMKYGRQRWKLKGKIEVNGKQSWDGEETVFLPLIVGFISIKVTELKGLATHILVGSVTCETKELFAARPQVVAVDINDLGTIKLNLEITWYPFDVEDMTASSGAGNKAAALQRRMSMYSQGTPETPTFKDHSFFSNLPDDIFENGKAAEEKMPLSLSFSDLPNGDCALTSHSTGSPSNSTNPEITITPAEFNLSSLASQNEGMDDTSSASSRNSLGEGQEPKSHLKEEDPEEPRKPASAPSEACRRQSSGAGAEHLFLENDVAEALLQESEEASELKPVELDTSEGNITKQLVKRLTSAEVPMATDRLLSEGSVGGESEGCRSFLDGSLEDAFNGLLLALEPHKEQYKEFQDLNQEVMNLDDILKK

SEQ ID NO: 911 - DNA, 1295 bp, Human
atcaaataccagctctgccagtaagaagttgcatctcccagtgaaatgctgctgctgccatttcaactgttagctgttctctttcctggtggtaacagtgaacatgccttccaggggccgacctcctttcatgttatccagacctcgtcctttaccaatagtacctgggcacaaactcaaggctcaggctggttggatgatttgcagattcatggctgggatagcgactcaggcactgccatattcctgaagccttggtctaaaggtaactttagtgataaggaggttgctgagttagaggagatattccgagtctacatctttggattcgctcgagaagtacaagactttgccggtgatttccagatgaaatacccctttgagatccagggcatagcaggctgtgagctacattctggaggtgccatagtaagcttcctgaggggagctctaggaggattggatttcctgagtgtcaagaatgcttcatgtgtgccttccccagaaggtggcagcagggcacagaaattctgtgcactaatcatacaatatcaaggtatcatggaaactgtgagaattctcctctatgaaacctgcccccgatatctcttgggcgtcctcaatgcaggaaaagcagatctgcaaagacaagtgaagcctgaggcctggctgtccagtggccccagtcctggacctggccgtctgcagcttgtgtgccatgtctcaggattctacccaaagcccgtgtgggtgatgtggatgcggggtgagcaggagcagcagggcactcagctaggggacatcctgcccaatgctaactggacatggtatctccgagcaaccctggatgtggcagatggggaggcggctggcctgtcctgtcgggtgaagcacagcagtttagagggccaggacatcatcctctactggagaaaccccacctccattggctcaattgttttggcaataatagtgccttccttgctccttttgctatgccttgcattatggtatatgaggcgccggtcatatcagaatatcccatgagccatcatcatgtctcctctcccattcgcaataagctaccaagaagcccaagatatcagcccaaaaatcaatcttatcatatttcaaatgattttcaaatttgatgaaatcagagttttcatgtattttaaaataaattattatttaaacatcagcaaaaaagtacttaaaactgtaaatttattatgagactgtactaacagtgtgattcaccctgattttacacacattaaaatgttagaaaaaat

SEQ ID NO: 912 - protein, 333 aa, Human
MLLLPFQLLAVLFPGGNSEHAFQGPTSFHVIQTSSFTNSTWAQTQGSGWLDDLQIHGWDSDSGTAIFLKPWSKGNFSDKEVAELEEIFRVYIFGFAREVQDFAGDFQMKYPFEIQGIAGCELHSGGAIVSFLRGALGGLDFLSVKNASCVPSPEGGSRAQKFCALIIQYQGIMETVRILLYETCPRYLLGVLNAGKADLQRQVKPEAWLSSGPSPGPGRLQLVCHVSGFYPKPVWVMWMRGEQEQQGTQLGDILPNANWTWYLRATLDVADGEAAGLSCRVKHSSLEGQDIILYWRNPTSIGSIVLAIIVPSLLLLLCLALWYMRRRSYQNIP

SEQ ID NO: 913 - DNA, 2707 bp, Human
catctttgagcaagatgggtctctaccgcatccgcgtgtccactggggcctcgctctatgccggttccaacaaccaggtgcagctgtggctggtcggccagcacggggaggcggcgctcgggaagcgactgtggcccgcacggggcaaggagacagaactcaaggtggaagtaccggagtatctggggccgctgctgtttgtgaaactgcgcaaacggcacctccttaaggacgacgcctggttctgcaactggatctctgtgcagggccccggagccggggacgaggtcaggttcccttgttaccgctgggtggagggcaacggcgtcctgagcctgcctgaaggcaccggccgcactgtgggcgaggaccctcagggcctgttccagaaacaccgggaagaagagctggaagagagaaggaagttgtaccggtggggaaactggaaggacgggttaattctgaatatggctggggccaaactatatgacctccctgtggatgagcgatttctggaagacaagagagttgactttgaggtttcgctggccaaggggctggccgacctcgctatcaaagactctctaaatgttctgacttgctggaaggatctagatgacttcaaccggattttctggtgtggtcagagcaagctggctgagcgcgtgcgggactcctggaaggaagatgccttatttgggtaccagtttcttaatggcgccaaccccgtggtgctgaggcgctctgctcaccttcctgctcgcctagtgttccctccaggcatggaggaactgcaggcccagctggagaaggagctggagggaggcacactgttcgaagctgacttctccctgctggatgggatcaaggccaacgtcattctctgtagccagcagcacctggctgcccctctagtcatgctgaaattgcagcctgatgggaaactcttgcccatggtcatccagctccagctgccccgcacaggatccccaccacctccccttttcttgcctacggatcccccaatggcctggcttctggccaaatgctgggtgcgcagctctgacttccagctccatgagctgcagtctcatcttctgaggggacacttgatggctgaggtcattgttgtggccaccatgaggtgcctgccgtcgatacatcctatcttcaagcttataattccccacctgcgatacaccctggaaattaacgtccgggccaggactgggctggtctctgacatgggaattttcgaccagataatgagcactggtgggggaggccacgtgcagctgctcaagcaagctggagccttcctaacctacagctccttctgtccccctgatgacttggccgaccgggggctcctgggagtgaagtcttccttctatgcccaagatgcgctgcggctctgggaaatcatctatcggtatgtggaaggaatcgtgagtctccactataagacagacgtggctgtgaaagacgacccagagctgcagacctggtgtcgagagatcactgaaatcgggctgcaaggggcccaggaccgagggtttcctgtctctttacaggctcgggaccaggtttgccactttgtcaccatgtgtatcttcacctgcaccggccaacacgcctctgtgcacctgggccagctggactggtactcttgggtgcctaatgcaccctgcacgatgcggctgcccccgccaaccaccaaggatgcaacgctggagacagtgatggcgacactgcccaacttccaccaggcttctctccagatgtccatcacttggcagctgggcagacgccagcccgttatggtggctgtgggccagcatgaggaggagtatttttcgggccctgagcctaaggctgtgctgaagaagttcagggaggagctggctgccctggataaggaaattgagatccggaatgcaaagctggacatgccctacgagtacctgcggcccagcgtggtggaaaacagtgtggccatctaagcgtcgccaccctttggttatttcagcccccatcacccaagccacaagctgaccccttcgtggttatagccctgccctcccaagtcccaccctcttcccatgtcccaccctccctagaggggcaccttttcatggtctctgcacccagtgaacacattttactctagaggcatcacctgggaccttactcctctttccttccttcctcctttcctatcttccttcctctctctcttcctctttcttcattcagatctatatggcaaatagccacaattatataaatcatttcaagactagaatagggggatataatacatattactccacaccttttatgaatcaaatatgatttttttgttgttgttaagacagagtctcactttgacacccaggctggagtgcagtggtgccatcaccacggctcactgcagcctcagcgtcctgggctcaaatgatcctcccacctcagcctcctgagtagctgggactacaggctcatgccatcatgcccagctaatatttttttattttcgtggagacggggcctcactatgttgcctaggctggaaataggattttgaacccaaattgagtttaacaataataaaaagttgttttacgctaaagatggaaaagaactaggactgaactattttaaataaaatattggcaaaagaaaaaaaaaaaaaaaaaaaaaaaaa

SEQ ID NO: 914 - DNA, 967 bp, Human
  unsure 884: unknown base
  unsure 885: unknown base
  unsure 886: unknown base
  unsure 887: unknown base
  unsure 888: unknown base
  unsure 889: unknown base
  unsure 890: unknown base
  unsure 891: unknown base
  unsure 892: unknown base
  unsure 893: unknown base
  unsure 894: unknown base
  unsure 895: unknown base
  unsure 896: unknown base
  unsure 897: unknown base
  unsure 898: unknown base
  unsure 899: unknown base
  unsure 900: unknown base
  unsure 901: unknown base
  unsure 902: unknown base
  unsure 903: unknown base
  unsure 904: unknown base
  unsure 905: unknown base
  unsure 906: unknown base
  unsure 907: unknown base
  unsure 908: unknown base
  unsure 909: unknown base
  unsure 910: unknown base
  unsure 911: unknown base
  unsure 912: unknown base
gaattcggcaccagctcacgcctgtgattctagcacttagagaggccaaggcgcaaggatcacctgagctcaggtgttggagatcagcttggtctacatagcaagacccccatatttacaacaaataaacaaaaattagcctggtgtgatggcacatgcctggagtcctagctgctcaggaggctgaggcaggaggatctcttgagcccaggagtttgaggttttatatatatatatatatataaattttgaggttttttatatatatatttttggaaagtagaactctccacctcacaatttaactcaatttccaagagcctttgaacacttaatgtgttcaatactgggaatactattcaaactgatttcaattcagctaaacttagcaaacaagatttatcctataggaagtcttactttacaatgattgaagacgttcagtacttcattaatgaaatcgtctttccagcttcctatcaacaagaatttttaaagtgcctactatacaaagcattttcctagttgatcccacagagtcacttggggcagattaccagatgctgagaagaaaaaacccttcatcagaggtggaggaaaaatggatttcaagagtgcttctggtttttgtcaggatggaccagagaatctggaacagtcctgaagaaaatagctggtggcttccttggccttttgccatcaatgatgcttcttacttggatttaaactgccattaggaaacctcttgatcaagaatttagacaagaatttcattcccatgtgataatttaggttataacactagaatggaacaaagagtagaatgtctttagttctttattttgcattatgtcataagaaagttcttgctatgttgtaaaatnnnnnnnnnnnnnnnnnnnnnnnnnnnnngctttaaaagacaaaaaaaaaaaaaaaaaaaaaaaaaaaaaaaaaaaaactcgac

SEQ ID NO: 915 - protein, 328 aa, Human
MCHQQLVISWFSLVFLASPLVAIWELKKDVYVVELDWYPDAPGEMVVLTCDTPEEDGITWTLDQSSEVLGSGKTLTIQVKEFGDAGQYTCHKGGEVLSHSLLLLHKKEDGIWSTDILKDQKEPKNKTFLRCEAKNYSGRFTCWWLTTISTDLTFSVKSSRGSSDPQGVTCGAATLSAERVRGDNKEYEYSVECQEDSACPAAEESLPIEVMVDAVHKLKYENYTSSFFIRDIIKPDPPKNLQLKPLKNSRQVEVSWEYPDTWSTPHSYFSLTFCVQVQGKSKREKKDRVFTDKTSATVICRKNASISVRAQDRYYSSSWSEWASVPCS

SEQ ID NO: 916 - DNA, 3511 bp, Human
ggaagccagacagctggctcgagcctctcctgctcagcaccatggctaagacccctagtgaccatctgctgtccaccctggaggagctggtgccctatgacttcgagaagttcaagttcaagctgcagaacaccagtgtgcagaaggagcactccaggatcccccggagccagatccagagagccaggccggtgaagatggccactctgctggtcacctactatggggaagagtacgccgtgcagctcaccctgcaggtcctgcgggccatcaaccagcgcctgctggccgaggagctccacagggcagccattcaggaatattccacacaagaaaacggcacagatgattccgcagcgtccagctccctgggggagaacaagcccaggagcctgaagactccagaccaccccgaggggaacgaggggaacggccctcggccgtacgggggcggagctgccagcctgcggtgcagccagcccgaggccgggagggggctgtcgaggaagcccctgagcaaacgcagagagaaggcctcggagggcctggacgcgcagggcaagcctcggacccggagcccggccctgccgggcgggagaagccccggcccctgcagggcgctagaggggggccaggccgaggtccggctgcgcagaaacgccagctccgcggggaggctgcaggggctggcggggggcgccccggggcagaaggagtgcaggcccttcgaagtgtacctgccctcgggaaagatgcgacctagaagccttgaggtcaccatttctacaggggagaaggcgcccgcaaatccagaaattctcctgactctagaggaaaagacagctgcgaatctggactcggcaacagaaccccgggcaaggcccactccggatggaggggcatctgcggacctgaaggaaggccctggaaatccagaacattcggtcaccggaaggccaccagacacggctgcgagtccccgctgccacgcccaggaaggagacccagttgacggtacctgtgtgcgtgattcctgcagcttccccgaggcagtttctgggcacccccaggcctcaggcagccgctcacctggctgcccccggtgccaggactcccatgaaaggaagagcccgggaagcctaagcccccagcccctgccacagtgtaagcgccacctgaagcaggtccagctgctcttctgtgaggatcacgatgagcccatctgcctcatctgcagtctgagtcaggagcaccaaggccaccgggtgcgccccattgaggaggtcgccctggaacacaagaagaaaattcagaagcagctggagcatctgaagaagctgagaaaatcaggggaggagcagcgatcctatggggaggagaaggcagtgagctttctgaaacaaactgaagcgctgaagcagcgggtgcagaggaagctggagcaggtgtactacttcctggaacagcaggagcatttctttgtggcctcactggaggacgtgggccagatggttgggcagatcaggaaggcatatgacacccgcgtatcccaggacatcgccctgctcgatgcgctgattggggaactggaggccaaggagtgccagtcagaatgggaacttctgcaggacattggagacatcttgcacagggctaagacagtgcctgtccctgaaaagtggaccactcctcaagagataaaacaaaagatccaactcctccaccagaagtcagagtttgtggagaagagcacaaagtacttctcagaaaccctgcgttcagaaatggaaatgttcaatgttccagagctgattggcgctcaggcacatgctgttaatgtgattctggatgcagaaaccgcttaccccaacctcatcttctctgatgatctgaagagtgttagacttggaaacaagtgggagaggctgcctgatggcccgcaaagatttgacagctgtatcattgttctgggctctccgagtttcctctctggccgccgttactgggaggtggaggttggagacaagacagcatggatcctgggagcctgcaagacatccataagcaggaaagggaacatgactctgtcgccagagaatggctactgggtggtgataatgatgaaggaaaatgagtaccaggcgtccagcgttcccccgacccgcctgctaataaaggagcctcccaagcgtgtgggcatcttcgtggactacagagttggaagcatctccttttacaatgtgacagccagatcccacatctatacattcgccagctgctctttctctgggccccttcaacctatcttcagccctgggacacgtgatggagggaagaacacagctcctctgactatctgtccagtgggtggtcaggggcctgactgaatgcccaacactgcatctctcttcctgcttctggccttgtatcttgcattcacactcaatagtcacggaatgccgactaggtgctagctgctatgggaaatgcaaaaataacaaaatagttactgtgcccacggagcctacccgattatagcagaggtaagttaggaacgaacatgttagtcaatccgggtgaagacatgtactgatgacacaccatggatttcagaggaggaagtacggagtcgttgcataatccgcccctggtgggtggcactctcaggtgctcctgaacagaagatttggccctcattttccctcagaaccccacggcaaggatatatgtccccttgttctctctgcttctgtcttgaggatatgggaagcctagagaaacgcaagcagactggattgggatagaagtatttgtgtacctggattaatgaactatgattttttttttttttttttgagaccaaatcttgctctgtggcccaggctggagtgcagtggcacgatctcagctcactgcaacctccacctcccaggttcaagcgattctcctgcctcagcctcctgagcagctgggattacaggtgcgtgccaccacaccaggctggttttcttgtatttttagtagagacgggggtttcaccatgttagccaggctggtctcgaactcctgacctcaggtgatccacccgcctcagcctcccaaagtgctgggattacaggcatgagccactgtgcccggcctatgattcttttttttttttttttttgagacaaagttttgctcttgtcacccaggctggagtgcagtggtgcaatcttggctcactgcaacctccgcctcccaggttcaagagattctcctgcctcagcctccgaagtagctgggattacaggcgcccgccaccatgcccggctaattttttgcatttttagtagacatgaggtttcatcatgttggccaggccggtctcaaactcctgacctcaggtgatgcacccacctcagcctcccaaagtgcagggattacaggcatgagccaccatgcctggccatgattcttaagagaattgactgggcctcatgaataaaaaaattagaaaatctaaaaaaaa

SEQ ID NO: 917 - protein, 781 aa, Human
MAKTPSDHLLSTLEELVPYDFEKFKFKLQNTSVQKEHSRIPRSQIQRARPVKMATLLVTYYGEEYAVQLTLQVLRAINQRLLAEELHRAAIQEYSTQENGTDDSAASSSLGENKPRSLKTPDHPEGNEGNGPRPYGGGAASLRCSQPEAGRGLSRKPLSKRREKASEGLDAQGKPRTRSPALPGGRSPGPCRALEGGQAEVRLRRNASSAGRLQGLAGGAPGQKECRPFEVYLPSGKMRPRSLEVTISTGEKAPANPEILLTLEEKTAANLDSATEPRARPTPDGGASADLKEGPGNPEHSVTGRPPDTAASPRCHAQEGDPVDGTCVRDSCSFPEAVSGHPQASGSRSPGCPRCQDSHERKSPGSLSPQPLPQCKRHLKQVQLLFCEDHDEPICLICSLSQEHQGHRVRPIEEVALEHKKKIQKQLEHLKKLRKSGEEQRSYGEEKAVSFLKQTEALKQRVQRKLEQVYYFLEQQEHFFVASLEDVGQMVGQIRKAYDTRVSQDIALLDALIGELEAKECQSEWELLQDIGDILHRAKTVPVPEKWTTPQEIKQKIQLLHQKSEFVEKSTKYFSETLRSEMEMFNVPELIGAQAHAVNVILDAETAYPNLIFSDDLKSVRLGNKWERLPDGPQRFDSCIIVLGSPSFLSGRRYWEVEVGDKTAWILGACKTSISRKGNMTLSPENGYWVVIMMKENEYQASSVPPTRLLIKEPPKRVGIFVDYRVGSISFYNVTARSHIYTFASCSFSGPLQPIFSPGTRDGGKNTAPLTICPVGGQGPD

SEQ ID NO: 918 - DNA, 2036 bp, Human
cacttccgggtagtgctccacgggcacgagccgcgattgggctaccgtagatggggtacttccggtgtgcaggtgctgggtccttcggcaggaggaggaagatggagcccagcaccgcggcccgggcttgggccctcttttggttgctgctgcccttgcttggcgcggtttgcgccagcggaccccgcaccttagtgctgctggacaacctcaacgtgcgggagactcattcgcttttcttccggagcctgaaggaccggggctttgagctcacattcaagaccgctgatgaccccagcctgtctctcataaagtatggggaattcctctatgacaatctcatcattttctccccttcggtagaagattttggaggcaacatcaacgtggagaccatcagtgcctttattgacggtggaggcagtgtgctggtagctgccagctccgacattggtgaccctcttcgagagctgggcagtgagtgcgggattgagtttgacgaggagaaaacggctgtcattgaccatcacaactatgacatctcagaccttggccagcatacgctcatcgtggctgacactgagaacctgctgaaggccccaaccatcgttgggaaatcatctctaaatcccatcctctttcgaggtgttgggatggtggccgatcctgataaccctttggtgctggacatcctgacgggctcttccacctcttactccttcttcccggacaagcctatcacccagtatccacatgcggtggggaagaacaccctcctcattgctgggctccaggccaggaacaatgcccgcgtcatcttcagcggctccctcgacttcttcagcgactccttcttcaactcagcagtgcagaaggcggcgcccggctcccagaggtattcccagacaggcaactatgaactagctgtggccctctcccgctgggtgttcaaggaggagggtgtcctccgtgtggggcctgtgtcccatcatcgggtgggtgagacagccccacccaatgcctacactgtcactgacctagtggagtatagcatcgtgatccagcagctctcaaatggcaaatgggtcccctttgatggcgatgacattcagctggagtttgtccgcattgatccttttgtgaggaccttcctgaagaagaaaggtggcaaatacagtgttcagttcaagttgcccgacgtgtatggtgtattccagtttaaagtggattacaaccggctaggctacacacacctgtactcttccactcaggtatccgtgcggccactccagcacacgcagtatgagcgcttcatcccctcggcctacccctactacgccagcgccttctccatgatgctggggctcttcatcttcagcatcgtcttcttgcacatgaaggagaaggagaagtccgactgaggggctagagccctctccgcacagcgtggagacggggcagggaggggggttattaggattggtggttttgttttgctttgtttaaagccgtgggaaaatggcacaactttacctctgtgggagatgcaacactgagagccaaggggtgggagttgggataatttttatataaaagaagtttttccactttgaattgctaaaagtggcatttttcctatgtgcagtcactcctctcatttctaaaatagggacgtggccaggcacggtggctcatgcctgtaatcccagcactttgggaggccgaggcaggcggctcacgaggtcaggagatcgagactatcctggctaacacggtaaaaccctgtctctactaaaagtacaaaaaattagctgggcgtggtggtgggcacctgtagtcccagctactcgggaggctgaggcaggagaaaggcatgaatccaggaggcagagcttgcagtgagctgagatcacgccattgcactccagcctgggcaacagtgttaagactctgtctcaaatataaataaataaataaataaataaaaataaagcgagatgttgccctcaaaaaaaaaaaaaaaaaaaaaaaaaaaa

SEQ ID NO: 919 - DNA, 2183 bp, Human
ggcagccgaggagaccccgcgcagtgctgccaacgccccggtggagaagctgaggtcatcatcagatttgaaatatttaaagtggatacaaaattatttcagcaatgcagacaattaagtgtgttgttgtgggcgatggtgctgttggtaaaacatgtctcctgatatcctacacaacaaacaaatttccatcggaatatgtaccgactgtttttgacaactatgcagtcacagttatgattggtggagaaccatatactcttggactttttgatactgcagggcaagaggattatgacagattacgaccgctgagttatccacaaacagatgtatttctagtctgtttttcagtggtctctccatcttcatttgaaaacgtgaaagaaaagtgggtgcctgagataactcaccactgtccaaagactcctttcttgcttgttgggactcaaattgatctcagagatgacccctctactattgagaaacttgccaagaacaaacagaagcctatcactccagagactgctgaaaagctggcccgtgacctgaaggctgtcaagtatgtggagtgttctgcacttacacagaaaggcctaaagaatgtatttgacgaagcaatattggctgccctggagcctccagaaccgaagaagagccgcaggtgtgtgctgctatgaacatctctccagagccctttctgcacagctggtgtcggcatcatactaaaagcaatgtttaaatcaaactaaagattaaaaattaaaattcgtttttgcaataatgacaaatgccctgcacctacccacatgcactcgtgtgagacaaggcccataggtatggccccccccttccccctcccagtactagttaattttgagtaattgtattgtcagaaaagtgattagtactatttttttttgttgtttcaaaaaaaaaatttttgtgtgtctgtttttttttttttttttttttgttgtttaaaaggaaggcatgcttgtggatgactctgtaacagactaattggaattgttgaagctgctccctggttccactctggagagtaatctgggacatcttagtgttttgttttgtttttttccctcctcttttttttgggggggagtgtgtgtggggtttgttttttagtcttgtttttttaattcattaaccagtggttagcccttaaggggaggaggacggattgattccacattccacttcctagatctagtttagaaaacatgttccccatctggtgctcttaggaaggagtatagtaaatgcctcatttaataacatactcctttttgaaagttgccttttctctccacccttgagtagatccagtatttgatgaaactcatgaaagtgggtggagcccatcttgcccctcctcttttctaggacgcactatatgtgactgtgactttcaaggacatttgtttgccatttgctgatttttttgggaagttaatttctaacttctttcactgataaatgaagaaaagtattgcacctttgaaatgcaccaaatgaattgagtttgtaattaaaaaaatttttttccctttcagtcattgtcttatatgcttagcatagatttgcagctcagtagtatatggtgttcctagaatgcagctgaagacctgttatgtagaggaaatacgaggggtggtgctagaagacagacatctgtggaatgattcacatcctctcaagttaggaggatggaggcctgcttcattaagaagctgggggtagggtgggggtggggagaacacttaacaacatggggaccagtcaggggaatccccttatttctgttttgcatatgaggaaccctagagcagccaggtgaggctctctagtttaataaaaatcatggaaagactcttaatgcagactcttcttaagtgttaatagggattttttcagcttattttggttgcagtttccaatttttaaaaatgttgaggtaatctttcccaccttcccaaacctaattcttgtagatgcattagtgttgaaccaatgctttctcatgtctcaattctttgtatatgcattcttttcagatgtattaaacaaacaaaaacccttcaaaaaaaaaaaaaaaaaaaaaaaaaaaaaaaaaaaaaaaaaaaaaaaaaaaaaaaaaaaaaaaaaaaaaaaaaaaaaaa

SEQ ID NO: 920 - protein, 191 aa, Human
MQTIKCVVVGDGAVGKTCLLISYTTNKFPSEYVPTVFDNYAVTVMIGGEPYTLGLFDTAGQEDYDRLRPLSYPQTDVFLVCFSVVSPSSFENVKEKWVPEITHHCPKTPFLLVGTQIDLRDDPSTIEKLAKNKQKPITPETAEKLARDLKAVKYVECSALTQKGLKNVFDEAILAALEPPEPKKSRRCVLL

SEQ ID NO: 921 - DNA, 3573 bp, Human
ggcacgagggcgcttgagttggtcgggggcagcggcagatttgaggcttaagcaacttcttccggggaagagtgccagtgcagccactgttacaattcaagatcttgatctatatccatagattggaatattggtgggccagcaatcctcagacgcctcacttaggacaaatgaggaaactgaggcttggtgaagttacgaaacttgtccaaaatcacacaacttgtaaagggcacagccaagattcagagccaggctgtaaaaattaaaatgaacaaattacggcaaagttttaggagaaagaaggatgtttatgttccagaggccagtcgtccacatcagtggcagacagatgaagaaggcgttcgcaccggaaaatgtagcttcccggttaagtaccttggccatgtagaagttgatgaatcaagaggaatgcacatctgtgaagatgctgtaaaaagattgaaagctactggaaagaaagcagttaaagcagttctgtgggtctcagcagatggactcagagttgtggatgaaaaaactaaggacctcatagttgaccagacgatagagaaagtttctttctgtgccccagacaggaactttgatagagccttttcttacatatgccgtgatggcaccactcgtcgctggatctgtcactgcttcatggctgtcaaggacacaggtgaaaggttgagccatgcagtaggctgtgcttttgcagcctgtttagagcgcaagcagaagcgggagaaggaatgtggagtgactgctacttttgatgctagtcggaccacttttacaagagaaggatcattccgtgtcacaacagccactgaacaagcagaaagagaggagatcatgaaacaaatgcaagatgccaagaaagctgaaacagataagatagtcgttggttcatcagttgcccctggcaacactgccccatccccatcctctcccacctctcctacttctgatgccacgacctctctggagatgaacaatcctcatgccatcccacgccggcatgctccaattgaacagcttgctcgccaaggctctttccgaggttttcctgctcttagccagaagatgtcaccctttaaacgccaactatccctacgcatcaatgagttgccttccactatgcagaggaagactgatttccccattaaaaatgcagtgccagaagtagaaggggaggcagagagcatcagctccctgtgctcacagatcaccaatgccttcagcacacctgaggaccccttctcatctgctccgatgaccaaaccagtgacagtggtggcaccacaatctcctaccttccaagctaatggcactgactcagccttccatgtgcttgctaagccagcccatactgctctagcacccgtagcaatgcctgtgcgtgaaaccaacccttgggcccatgcccctgatgctgctaacaaggaaattgcagccacatgttcggggaccgagtggggtcaatcttctggtgctgcctctccaggtctcttccaggccggtcatagacgtactccctctgaggccgaccgatggttagaagaggtgtctaagagcgtccgggctcagcagccccaggcctcagctgctcctctgcagccagttctccagcctcctccacccactgccatctcccagccagcatcacctttccaagggaatgcattcctcacctctcagcctgtgccagtgggtgtggtcccagccctgcaaccagcctttgtccctgcccagtcctatcctgtggccaatggaatgccctatccagcccctaatgtgcctgtggtgggcatcactccctcccagatggtggccaacgtatttggcactgcaggccaccctcaggctgcccatccccatcagtcacccagcctggtcaggcagcagacattccctcactacgaggcaagcagtgctaccaccagtcccttctttaagcctcctgctcagcacctcaacggttctgcagctttcaatggtgtagatgatggcaggttggcctcagcagacaggcatacagaggttcctacaggcacctgcccagtggatccttttgaagcccagtgggctgcattagaaaataagtccaagcagcgtactaatccctcccctaccaaccctttctccagtgacttacagaagacgtttgaaattgaactttaagcaatcattatggctatgtatcttgtccataccagacagggagcagggggtagcggtcaaaggagcaaaacagactttgtctcctgattagtactcttttcactaatcccaaaggtcccaaggaacaagtccaggcccagagtactgtgaggggtgattttgaaagacatgggaaaaagcattcctagagaaaagctgccttgcaattaggctaaagaagtcaaggaaatgttgctttctgtactccctcttcccttacccccttacaaatctctggcaacagagaggcaaagtatctgaacaagaatctatattccaagcacatttactgaaatgtaaaacacaacaggaagcaaagcaatctccctttgtttttcaggccattcacctgcctcctgtcagtagtggcctgtattagagatcaagaagagtggtttgtgctcaggctggggaacagagaggcacgctatgctgccagaattcccaggagggcatatcagcaactgcccagcagagctatattttgggggagaagttgagcttccattttgagtaacagaataaatattatatatatcaaaagccaaaatctttatttttatgcatttagaatattttaaatagttctcagatattaagaagttgtatgagttgtaagtaatcttgccaaaggtaaaggggctagttgtaagaaattgtacataagattgatttatcattgatgcctactgaaataaaaagaggaaaggctggaagctgcagacaggatccctagcttgttttctgtcagtcattcattgtaagtagcacattgcaacaacaatcatgcttatgaccaatacagtcactaggttgtagttttttttaaataaaggaaaagcagtattgtcctggttttaaacctatgatggaattctaatgtcattattttaatggaatcaatcgaaatatgctctatagagaatatatcttttatatattgctgcagtttccttatgttaatcctttaacactaaggtaacatgacataatcataccatagaagggaacacaggttaccatattggtttgtaatatgggtcttggtgggttttgttttatcctttaaattttgttcccatgagttttgtggggatggggattctggttttattagctttgtgtgtgtcctcttcccccaaacccccttttggtgagaacatccccttgacagttgcagcctcttgacctcggataacaataagagagctcatctcatttttacttttgaacgttggccttacaatcaaatgtaagttatatatatttgtactgatgaaaatttataatctgctttaacaaaataaatcttcatggtagaaaaaaaaaaaaaaaaaaaaa

SEQ ID NO: 922 - protein, 640 aa, Human
MNKLRQSFRRKKDVYVPEASRPHQWQTDEEGVRTGKCSFPVKYLGHVEVDESRGMHICEDAVKRLKATGKKAVKAVLWVSADGLRVVDEKTKDLIVDQTIEKVSFCAPDRNFDRAFSYICRDGTTRRWICHCFMAVKDTGERLSHAVGCAFAACLERKQKREKECGVTATFDASRTTFTREGSFRVTTATEQAEREEIMKQMQDAKKAETDKIVVGSSVAPGNTAPSPSSPTSPTSDATTSLEMNNPHAIPRRHAPIEQLARQGSFRGFPALSQKMSPFKRQLSLRINELPSTMQRKTDFPIKNAVPEVEGEAESISSLCSQITNAFSTPEDPFSSAPMTKPVTVVAPQSPTFQANGTDSAFHVLAKPAHTALAPVAMPVRETNPWAHAPDAANKEIAATCSGTEWGQSSGAASPGLFQAGHRRTPSEADRWLEEVSKSVRAQQPQASAAPLQPVLQPPPPTAISQPASPFQGNAFLTSQPVPVGVVPALQPAFVPAQSYPVANGMPYPAPNVPVVGITPSQMVANVFGTAGHPQAAHPHQSPSLVRQQTFPHYEASSATTSPFFKPPAQHLNGSAAFNGVDDGRLASADRHTEVPTGTCPVDPFEAQWAALENKSKQRTNPSPTNPFSSDLQKTFEIEL

SEQ ID NO: 923 - DNA, 3009 bp, Human
gcgcaggcgcggcggccgatgcgagtgtgtatgtgcgggcgagaagatggcggcggcgggggaagcagcgtgagcagccggaggatcgcggagtcccaatgaaacgggcagccatggccctccacagcccgcagtatatttttggagattttagccctgatgaattcaatcaattctttgtgactcctcgatcttcagttgagcttcctccatacagtggaacagttctgtgtggcacacaggctgtggataaactacctgatggacaagaatatcagagaattgagtttggtgtcgatgaagtcattgaacccagtgacactttgccgagaacccccagctacagtatttcaagcacactgaaccctcaggcccctgaatttattctcggttgtacagcttccaaaataacccctgatggtatcactaaagaagcaagctatggctccatcgactgccagtacccaggctctgccctcgctttggatggaagttctaatgtggaggcggaagttttggaaaatgatggtgtctcaggtggtcttggacaaagggagcgtaaaaagaagaaaaagcggccacctggatattacagctatttgaaagatggtggcgatgatagtatctccacagaagccctggtcaatggccatgccaattcagcagtcccgaacagtgtcagtgcagaggatgcagaatttatgggtgacatgcctccgccacttacgcccaggacttgtaacagcccccagaactccacagactctgtcagtgacattgtgcctgacagtcctttccccggagcactcggcagtgacaccaggactgcagggcagccagaggggggccccggggctgattttggtcagtcctgcttccctgcagaggctggcagagacaccctgtcaaggacagctggggctcagccctgcgttggtaccgatactactgaaaaccttggagttgctaatggacaaatacttgaatcctcgggtgagggcacagctaccaacggggtggagttgcacaccacggaaagcatagacttggacccaaccaaacccgagagtgcatcacctcctgctgacggcacgggctctgcatcaggcacccttcctgtcagccagcccaagtcctgggccagcctctttcatgattctaagccctcttcctcctcgccggtggcctatgtggaaactaagtattcccctcccgccatatctcccctggtttctgaaaagcaggttgaagtcaaagaagggcttgttccggtttcagaggatcctgtagccataaagattgcagagttgctggagaatgtaaccctaatccataaaccagtgtcgttgcaaccccgtgggctgatcaataaagggaactggtgctacattaatgctacactgcaggcattggttgcttgcccgccgatgtaccacctgatgaagttcattcctctgtattccaaagtgcaaaggccttgtacgtcaacacccatgatagacagctttgttcggctaatgaatgagttcactaatatgccagtacctccaaaaccccgacaagctcttggagataaaatcgtgagggatattcgccctggagctgcctttgagcccacatatatttacagactcctgacagttaacaagtcaagcctgtctgaaaagggtcgacaagaagatgctgaggaatacttaggcttcattctaaatggacttcatgaggaaatgttgaacctaaagaagcttctctcaccaagtaatgaaaaacttacgatttccaacggccccaaaaaccactcggtcaatgaagaagagcaggaagaacaaggtgaaggaagcgaggatgaatgggaacaagtgggcccccggaacaagacttccgtcacccgccaggcggattttgttcagactccaatcaccggcatttttggtggacacatcaggtctgtggtttaccagcagagttcaaaagaatctgccactttgcagccatttttcacgttgcagttggatatccagtcagacaagatacgcacagtccaggatgcactggagagcttggtggcaagagaatctgtccaaggttataccacaaaaaccaaacaagaggttgagataagtcgaagagtgactctggaaaaactccctcctgtcctcgtgctgcacctgaaacgattcgtttatgagaagactggtgggtgccagaagcttatcaaaaatattgaatatcctgtggacttggaaattagtaaagaactgctttctccaggggttaaaaataagaattttaaatgccaccgaacctatcggctctttgcagtggtctaccatcacggcaacagtgcgacgggcggccattacactacagacgtcttccagatcggtctgaatggctggctgcgcatcgatgaccagacagtcaaggtgatcaaccagtaccaggtggtgaaaccaactgctgaacgcacagcctacctcctgtattaccgccgagtggacctgctgtaaaccctgtgtgcgctgtgtgtgcgcccagtgcccgcttcgtaggacaccacctcacactcacttcccgcctctctttagtggctctttagagagaaactctttctccctttgcaaaaatgggctagaatgaaaaggagatgccttggggttcgtgcacaacacagcttctgttgactctaacttccaaatcaaaatcatttggttgaaacagactgttgcttgattttagaaaatacacaaaaacccatatttctgaaataatgctgattcctgagataagaaagtggatttgatccccagtctcattgcttagtagaataaatcctgcaccagcaacaacacttgtaaatttgtgaaaatgaattttatctttccttaaaaaagaaattttttaatccatcacacttttcttccctaccctttagtttttgataaatgataaaaatgagccagttatcaaagaagaactagttcttacttcaaaaaaaaaaaaaaaaaa

SEQ ID NO: 924 - protein, 798 aa, Human
MALHSPQYIFGDFSPDEFNQFFVTPRSSVELPPYSGTVLCGTQAVDKLPDGQEYQRIEFGVDEVIEPSDTLPRTPSYSISSTLNPQAPEFILGCTASKITPDGITKEASYGSIDCQYPGSALALDGSSNVEAEVLENDGVSGGLGQRERKKKKKRPPGYYSYLKDGGDDSISTEALVNGHANSAVPNSVSAEDAEFMGDMPPPLTPRTCNSPQNSTDSVSDIVPDSPFPGALGSDTRTAGQPEGGPGADFGQSCFPAEAGRDTLSRTAGAQPCVGTDTTENLGVANGQILESSGEGTATNGVELHTTESIDLDPTKPESASPPADGTGSASGTLPVSQPKSWASLFHDSKPSSSSPVAYVETKYSPPAISPLVSEKQVEVKEGLVPVSEDPVAIKIAELLENVTLIHKPVSLQPRGLINKGNWCYINATLQALVACPPMYHLMKFIPLYSKVQRPCTSTPMIDSFVRLMNEFTNMPVPPKPRQALGDKIVRDIRPGAAFEPTYIYRLLTVNKSSLSEKGRQEDAEEYLGFILNGLHEEMLNLKKLLSPSNEKLTISNGPKNHSVNEEEQEEQGEGSEDEWEQVGPRNKTSVTRQADFVQTPITGIFGGHIRSVVYQQSSKESATLQPFFTLQLDIQSDKIRTVQDALESLVARESVQGYTTKTKQEVEISRRVTLEKLPPVLVLHLKRFVYEKTGGCQKLIKNIEYPVDLEISKELLSPGVKNKNFKCHRTYRLFAVVYHHGNSATGGHYTTDVFQIGLNGWLRIDDQTVKVINQYQVVKPTAERTAYLLYYRRVDLL

SEQ ID NO: 925 - DNA, 1203 bp, Human
agaaagccgcgcacctcctcccgccaggcgctttctcggacgccttgcccagcgggccgcccgaccccctgcaccatggaccccgctcgccccctggggctgtcgattctgctgcttttcctgacggaggctgcactgggcgatgctgctcaggagccaacaggaaataacgcggagatctgtctcctgcccctagactacggaccctgccgggccctacttctccgttactactacgacaggtacacgcagagctgccgccagttcctgtacgggggctgcgagggcaacgccaacaatttctacacctgggaggcttgcgacgatgcttgctggaggatagaaaaagttcccaaagtttgccggctgcaagtgagtgtggacgaccagtgtgaggggtccacagaaaagtatttctttaatctaagttccatgacatgtgaaaaattcttttccggtgggtgtcaccggaaccggattgagaacaggtttccagatgaagctacttgtatgggcttctgcgcaccaaagaaaattccatcattttgctacagtccaaaagatgagggactgtgctctgccaatgtgactcgctattattttaatccaagatacagaacctgtgatgctttcacctatactggctgtggagggaatgacaataactttgttagcagggaggattgcaaacgtgcatgtgcaaaagctttgaaaaagaaaaagaagatgccaaagcttcgctttgccagtagaatccggaaaattcggaagaagcaattttaaacattcttaatatgtcatcttgtttgtctttatggcttatttgcctttatggttgtatctgaagaataatatgacagcatgaggaaacaaatcattggtgatttattcaccagtttttattaatacaagtcactttttcaaaaatttggatttttttatatataactagctgctattcaaatgtgagtctaccatttttaatttatggttcaactgtttgtgagactgaattcttgcaatgcataagatataaaagcaaatatgactcactcatttcttggggtcgtattcctgatttcagaagaggatcataactgaaacaacataagacaatataatcatgtgcttttaacatatttgagaataaaaaggactagcaaataaaacacaaaaaaaaaaaaaaaaaaaaaaaaaaaaaaa

SEQ ID NO: 926 - DNA, 1815 bp, Human
gcggccgctcgcccctcggggaatatggcgccctcggggctgaaggcggtggtgggggaaaaaattctgagcggagttattcggagtgtcaagaaggatggggagtggaaggtgcttatcatggatcacccaagcatgcgcatcttgtcttcctgctgcaaaatgtcagatatcctggctgagggcatcaccattgttgaagacatcaacaaacggcgggaacccattcccagtctggaggccatttatttgctgagccccacggagaagtcggttcaggccctgatcaaagacttccaggggaccccgactttcacctacaaagcggcccatatcttcttcaccgacacctgccccgagcccctgttcagtgagctaggccgctctcgtctggcaaaggtggtgaagacgttgaaggagattcaccttgccttcctcccctacgaggcccaggtgttctccctcgatgctccccacagcacctacaacctctactgccccttccgggcagaggagcgcacgcggcagctcgaggtgctggcccagcagattgccacgctgtgcgccaccctgcaggagtacccggccatccgctaccgcaagggcccagaggacacagcccagttggcccacgccgtcctggccaagctgaacgccttcaaggcagacactcccagtctgggcgagggcccagagaaaacccgctcccagctgctgataatggaccgggcagctgaccccgtgtccccactactgcatgagctcacgttccaggccatggcgtatgatctgctggacatagagcaggacacatacaggtatgagaccaccgggctgagcgaggcgcgggagaaggccgtcttgctggacgaggacgatgacttgtgggtggagcttcgccacatgcatatcgcagatgtgtccaagaaggtcacggagctcctgaggaccttctgtgagagcaagaggctgaccacggacaaggcgaacatcaaagacctatcccagatcctgaaaaagatgccgcagtaccagaaggagctgaataagtattctacgcacctgcatctagcagatgattgtatgaagcacttcaagggctcggtggagaagctgtgtagtgtggagcaggacctggccatgggctccgacgcagagggggagaagatcaaggactccatgaagctgatcgttccggtgctgctggacgcggcggtgcccgcctacgacaagatccgggtcctgctgctctacatcctccttcggaatggtgtgagtgaggagaacctggccaagctgatccagcatgccaatgtacaggcgcacagcagcctcatccgtaacctggagcagctgggaggcactgtcaccaaccccgggggctcggggacctccagccggctggagccgagagaacgcatggagcccacctatcagctgtcccgctggaccccggtcatcaaggatgtaatggaggacgccgtggaggaccggctggacaggaacctgtggcccttcgtatccgaccccgcccccacggccagctcccaggccgctgtcagtgcccgcttcggtcactggcacaagaacaaggctggcgtagaagcccgggcgggcccccggctcatcgtgtatgtcatgggcggtgtggccatgtcagagatgagggccgcctacgaggtgaccagggccaccgagggcaagtgggaggtgctcattggctcctcacacatcctcaccccgacccgcttcctggatgacctgaaggcactggacaagaagctggaggacattgccctgccctgacgcggccgc

SEQ ID NO: 927 - protein, 593 aa, Human
MAPSGLKAVVGEKILSGVIRSVKKDGEWKVLIMDHPSMRILSSCCKMSDILAEGITIVEDINKRREPIPSLEAIYLLSPTEKSVQALIKDFQGTPTFTYKAAHIFFTDTCPEPLFSELGRSRLAKVVKTLKEIHLAFLPYEAQVFSLDAPHSTYNLYCPFRAEERTRQLEVLAQQIATLCATLQEYPAIRYRKGPEDTAQLAHAVLAKLNAFKADTPSLGEGPEKTRSQLLIMDRAADPVSPLLHELTFQAMAYDLLDIEQDTYRYETTGLSEAREKAVLLDEDDDLWVELRHMHIADVSKKVTELLRTFCESKRLTTDKANIKDLSQILKKMPQYQKELNKYSTHLHLADDCMKHFKGSVEKLCSVEQDLAMGSDAEGEKIKDSMKLIVPVLLDAAVPAYDKIRVLLLYILLRNGVSEENLAKLIQHANVQAHSSLIRNLEQLGGTVTNPGGSGTSSRLEPRERMEPTYQLSRWTPVIKDVMEDAVEDRLDRNLWPFVSDPAPTASSQAAVSARFGHWHKNKAGVEARAGPRLIVYVMGGVAMSEMRAAYEVTRATEGKWEVLIGSSHILTPTRFLDDLKALDKKLEDIALP

SEQ ID NO: 928 - DNA, 3729 bp, Human
ggcccaagccgccattgttccgccgagggaggacagcggggcctggcgctggcgccgagacgccgcttagcggccgccactggagacactccctcccgcctcccgggtctcctggcggcggcggagtgaggctgacagcggggaacctgggagacccctccgccctccccgcggtggcagcggccgatccccggctccggcgcgagggacggccgcgatgcgctcggcctgaggttacccggcccggcccttcctcgcttccctcgactattccactgcgtctccgcgccccggcgtcatcctgcgagtccctctgacgggagggaagatggctgcacggagctggcaggacgagctggcccagcaggccgaggagggctcggcccggctgcgggaaatgctctcggtcggcctaggctttctgcgcaccgagctgggcctcgacctggggctggagccgaaacggtaccccggctgggtgatcctggtgggcactggcgcgctcgggctgctgctgctgtttctgctgggctacggctgggccgcggcttgcgccggctcccgcaaaaagcggaggagcccgccccgcaagcgggaggaggcggcggccgtgccggccgcggcccccgacgacctggccttgctgaagaatctccggagcgaggaacagaagaagaagaaccggaagaaactgtccgagaagcccaaaccaaatgggcggactgttgaagtggctgagggtgaagctgttcgaacacctcaaagtgtaacagcaaagcagccaccagagattgacaagaaaaatgaaaagtcaaagaaaaataagaagaaatcaaagtcagatgctaaagcagtgcaaaacagttcacgccatgatggaaaggaagttgatgaaggagcctgggaaactaaaattagtcacagagagaaacgacagcagcgtaaacgtgataaggtgctgactgattctggttcattggattcaactatccctgggatagaaaataccatcacagttaccaccgagcaacttacaaccgcatcatttcctgttggttccaagaagaataaaggtgattctcatctaaatgttcaagttagcaactttaaatctggaaaaggagattctacacttcaggtttcttcaggattgaatgaaaacctcactgtcaatggaggaggctggaatgaaaagtctgtaaaactctcctcacagatcagtgcaggtgaggagaagtggaactccgtttcacctgcttctgcaggaaagaggaaagctgagccatctgcctggagtcaagacactggagatgctaatacaaatggaaaagactggggaaggagttggagtgaccgttcaatattttctggcattgggtctactgctgagccagtttctcagtctaccacttctgattatcagtgggatgttagccgtaatcaaccctatatcgatgatgaatggtctgggttaaatggtctgtcttctgctgatcccaactctgattggaatgcaccagcagaagagtggggcaattgggtagacgaagaaagagcttcacttctaaagtcccaggaaccaattcctgatgatcaaaaggtctcagatgatgataaagaaaagggagagggagctcttccaactgggaaatccaaaaagaaaaaaaagaaaaagaagaagcaaggtgaagataactctactgcacaggacacagaagaattagaaaaagagattagagaagaccttccagtgaatacctctaaaacccgtccaaaacaggaaaaagctttttccttgaagaccataagcactagtgatccagccgaagtactcgtcaaaaatagccagcctatcaagactcttccacctgctacttctaccgagccatctgtaatcttatcaaaaagtgattctgacaagagctcttcccaagtgccgccaatactacaagagacagataaatccaagtcaaataccaagcaaaatagtgtgcctccttcacagaccaagtctgaaactagctgggaatctcccaaacaaataaaaaagaagaaaaaagccagacgagaaacgtgaaattttttttcctgaattggacatgtgtttgcaaacacttgtcttgaagattatgctgtttatgcaataatttgtgaacatgtacagagttttatataaatttaaaccaatttttaaaacaaaactgcggacaccaccataaaaatggaatcaaaagaaagttaatttatgaaattaagaggtcagcagaatatactcagtgatggaagacacttgggaaagtctttttaatagaacaagaacgatcttaatttaagaatattatcctggtttaacaacagtgccctgtttacaacagattgtgccctatctcatctgcagccgaggaataaaggattctgattagaaagagggttgcctacagattagtaagcaattccttggatcttatgcacagaacttgtaccatttgaatctgttttatgcttaaatcaaagtgctttgatcaaatgcataacctgccatatctttacatatttgttggtagcaatttgtattaaagaaatcacaagtgcaaataaaaagtcatttatcatttgtttaactaaactgtcatggtttagtttacaatttttaaaaagttcttaaaatactgaaaatgcagttgacacttgtgtatggcttatgaagttatttttgatagtcttacattacttgaattgttcaaagtacagtatattttaaattaagaaaagtgaactatatgtatttgttttatacatttaaggcttagactcataaataatgctattgtttatgatttgaaaactttcaggcaaaatccaatttacatttttcccttccctagcaattacttttttccagcttcaactcttcttagttactaatactttgttgactttaaaaatgaaatcattcacaaacttttggtatatgatggagaatgaaaaactagagtcagacagctttaattgacattgtcaacacctccagttatcaggaatacatttttttactgccttaacctgtagtgcgtagaatatgcatcaatttcttgaaggagattcatgtttttataagaattttcatgtaattattgcaattgtggtcaaataaggaacgtttcctgcttgaaattatattgatttaaatgatgtgtgagatgtttcaccattttcaggcactgtgtaattctattgtaataaactggcaggtatctttgtaactataaatagtgcatgctcagccatgtacactgtaaatagcctttaccaaacgtgtttgacaaggaccataattaacatcacttagtgaattgtgataaagaaaaaaaagccatgatttattcgatgtgattggcttgtttttatgtggcgccaagaacgaacctgtttaacagctgtaaccaatggtactgatctatccatccaatgttgtcattatatttgactgtggttcaacagtattgcgttgtcagactaggaaagctaaacgaacaaaatggttttagttttgctgaagactggccttattaatggacagctttcctaacaagagattattaacttttatcaggtgttaacatctgtttcaggaacatggcagtatgtttacatgtcagaagttttgtttaattctatggtatttctaaattgacttgtttaaataaattcagcaaaaaaaaaaaaaaa

SEQ ID NO: 929 - DNA, 1826 bp, Human
gcgaggcgtcgggatgcagcgccccgggcccttcagcaccctctacgggcgggtcttggccccgctgcccgggagggccgggggcgcggcctccggcggaggagggaacagctgggacctcccgggttcccacgtgcggctgccggggcgtgcacagtctgggacccgtggcggtgctggcaacacaagcaccagctgcggggactccaacagcatctgcccggccccctccacgatgtccaaggccgaggaggccaagaagctggcgggccgcgcggctgtggagaaccacgtgaggaataaccaagtgctgggaattggaagtggttctacaattgtccatgctgtgcagcgaatagctgaaagggtgaagcaagagaatctgaacctcgtctgtattcccacttccttccaggcccgccagctcatcctgcagtatggcttgaccctcagtgatctggatcgacacccagagatcgaccttgccatcgatggtgctgatgaagtagatgctgatctcaatctcatcaagggtggcggaggctgcctgacccaggagaagattgtggctggctatgctagtcgcttcatcgtgatcgctgatttcaggaaagattcgaagaatctcggggatcagtggcacaagggaatccccatcgaggtcatcccaatggcctatgtcccagtgagccgagctgtgagccagaagtttgggggcgtggttgaacttcgaatggctgtcaacaaggctggtcctgtggtgacagataatgggaattttatcttggactggaagtttgaccgggtacacaaatggagtgaagtgaatacagctatcaaaatgatcccaggtgtggtggacacaggcctattcatcaacatggctgagagagtctactttgggatgcaggatggctcagtgaacatgagggagaagcctttctgttgaccctgcaaggagcagagtgtgttcaccttgagtctccagcccacagccaaggtggacgtacctctccaggagcctttgccttaatgtatctctgcctggacaacttgtggtggggggtggggggaagagtgggagggggagttaaatccagtcttatgaagtattgttattaaatgtctttttaaaaagagaaatataaacatatatttttactattaaaatattcagttttttaaatgaagtagaacttgagttcatgttttatatgaaatatttaccaaaaaaaaaaaatgaggtaaactgtatttaaaacctttgacttgagtctgctggtaaagcttctgaatattgagtttgctgagaaataaaaatcaaaacttctttaagctggtaaagtgaggggcccaccagcagtgatctcctgatgccttactggaaactttgtttacttgtctgctaccctctgatttgtttttagttagtttttattgtgagcacacatagtacctagttacatcttaagatcaggtgtataaaactgtggagtggagcggtatggtatggaatgacttggaatgtaagctgtcagggagaaaatgttgttacacttttgctaagatctgggggtttcttcatattcctgctgttggaagcagttgaccagaaatgcttgccagtactgccaaagcactgctgtgaaatgtgaagtactttgtttttttatttttaatgattttctttttgttattaatatttttctctgttcctttgttattacttgcatggtttggcgtcagaagtccttacctctttatattgtttgcaggtttaaataaaacagtgtggtgccaaaaaaaaaaaaaaaaaaaaaaaaaaa

SEQ ID NO: 930 - protein, 311 aa, Human
MQRPGPFSTLYGRVLAPLPGRAGGAASGGGGNSWDLPGSHVRLPGRAQSGTRGGAGNTSTSCGDSNSICPAPSTMSKAEEAKKLAGRAAVENHVRNNQVLGIGSGSTIVHAVQRIAERVKQENLNLVCIPTSFQARQLILQYGLTLSDLDRHPEIDLAIDGADEVDADLNLIKGGGGCLTQEKIVAGYASRFIVIADFRKDSKNLGDQWHKGIPIEVIPMAYVPVSRAVSQKFGGVVELRMAVNKAGPVVTDNGNFILDWKFDRVHKWSEVNTAIKMIPGVVDTGLFINMAERVYFGMQDGSVNMREKPFC

SEQ ID NO: 931 - DNA, 7190 bp, Human
cttttagtttctcttctttctaaagaaggctcgcggagcccggctggagaacctcaccctcgccgagcctagaaccgagagggggccaccccaggcggtcaccagcagatttgcccgcgcgttctctttctttccacccagttgcccttgcggccggctgtaaacctgccactaggacccggtcggtgagatctagcctcttgacctgagagccgagagtggatcgctgggctgggctaacggcgacggagagcgcgccctcgctgactccgggcgcgcccagcagtagcaccgcccgcgcccgcccctggacacttgtaagtttcgatttccgatttccgcggaaccgagtcccgcgccgcggcagagccagcacagccagcgcgccatggcggacccggaggtgtgctgcttcatcaccaaaatcctgtgcgcccacgggggccgcatggccctggacgcgctgctccaggagatcgcgctgtctgagccgcagctctgtgaggtgctgcaggtggccgggcccgaccgctttgtggtgttggagaccggcggcgaggccgggatcacccgatcggtggtggccaccactcgagcccgggtctgccgtcgcaagtactgccagagaccctgcgataacctgcatctctgcaaactcaacttgctgggccggtgcaactattcgcagtccgagcggaatttatgcaaatattctcatgaggttctctcagaagagaacttcaaagtcctgaaaaatcacgaactctctggactgaacaaagaggaattagcagtgctcctcctccaaagtgatcctttttttatgcccgagatatgcaaaagttataagggagagggtcggcagcagatttgtaaccagcagccaccgtgttcaagactccacatctgtgaccacttcacccgagggaactgtcgttttcccaactgcctccggtcccataacctgatggacagaaaggtgctggccatcatgagggagcacgggctgaaccccgacgtggtccagaacatccaggacatctgcaacagcaagcacatgcagaagaatcccccagggcccagagctccttcttcacatcgtagaaacatggcatatagggctagaagcaagagtagagatcggttctttcagggcagccaagaatttcttgcgtctgcttcagcgtctgctgagaggtcctgcacacctagtccagatcagatcagccacagggcttccctggaggacgcgcctgtggacgatctcacccgcaagttcacgtatctggggagtcaggatcgcgctcggcctccctcaggctcgtccaaggctactgatcttggaggaacaagtcaggccgggacaagccagaggtttttagagaacggcagtcaagaggacctcttgcatggaaatccaggcagcacttaccttgcttccaattcaacatcagcccccaactggaagagcctcacatcctggacgaatgaccaaggcgccaggagaaagactgtgttttctcccacgctacctgccgcccgctcttctcttggctctctgcaaacacctgaagctgtgaccaccagaaagggcacaggcttgctttcctcagactacaggatcatcaatggcaaaagtggaactcaggacatccagcctggccctctttttaataataatgctgatggagtggccacagatataacttctaccagatccttaaattacaaaagcactagcagcggtcacagagaaatatcatcacctaggattcaggatgctggacctgcttcccgagatgtccaggccactggcagaatcgcagatgatgctgacccaagagtagcacttgttaacgattctttatctgatgtcacaagtaccacatcttctagggtggatgatcatgactcagaggaaatttgtcttgaccatctgtgtaagggttgtccgcttaatggtagctgcagcaaagtccacttccatctgccttaccggtggcagatgcttattggtaaaacctggacggactttgagcacatggagacgatcgagaaaggctactgtaaccccggaatccacctctgttctgtaggaagttatacaatcaattttcgggtaatgagttgtgattcctttcccatccgacgcctctccactccttcttctgtcaccaagccagccaattctgtcttcaccaccaaatggatttggtattggaagaatgaatctggcacatggattcagtatggagaagagaaagacaaacggaaaaattcaaacgtcgactcttcatacctggagtctctctatcaatcctgtccgaggggagttgtgccatttcaggcgggctcacggaactatgagctgagtttccaagggatgattcagacaaacatagcttccaaaactcaaaaggatgtcatcagaagaccaacatttgtgcctcagtggtatgtgcagcagatgaagagagggccagaccatcagccagcaaagacctcgtcagtgtctttaactgcgacctttcgtcctcaggaggacttttgcttcctatcctcaaagaaatataagttgtcagagatccatcacctacatccagaatatgtcagagtaagtgagcattttaaagcttccatgaaaaatttcaagattgaaaagataaagaagatcgagaactcagagctcctggataaatttacatggaagaaatcgcagatgaaggaagaaggaaaactcctattttatgcgacaagccgtgcctatgtggaatctatctgttcgaataattttgacagtttcctacatgaaactcatgaaaacaaatacggaaaaggaatttactttgcaaaagatgccatctattcccacaaaaattgcccgtatgatgccaaaaacgtcgttatgtttgtagcccaagttctggttggaaagtttactgaaggaaatataacgtacacgagccctcctccacagttcgacagctgtgtggataccagatcgaatccctccgtttttgtcatctttcagaaagatcaggtttacccacaatatgtgattgaatatactgaagacaaagcctgcgtgattagttagaaccgatgaatacagcgtcagaaggatgccataaccattctgttcctttacagaactaaattgccgcagacaggagttaaagttttatattttcctgctcagttatctaatgtcttagatcagtggtccccaaattttgctacatattagaatcatctgggaggttttaaacaaattctgatgcccaggttgcaccccatgccaatgaaatcatttctgggcgtcagcgccaggcagttgtatttttttttttttttttttttttgagactgaatctcactccatcgtccaggctggagtgcagtggcgcgatctcggctcactgcaacctctgcctcccgggttcaagcaattctcctgcctcagcctcccgagtagctggaactacaggcacacactgccgcgcccagctaattttttgtattttttagtagagacagggtttcactgtgttgcccaggctggtctcaaactcctgagctcaggcaatctgcccgccttggcctcccaaagtgctaggattacaggtatgagccaccatgcccggctggcagttgtattttttaaagcccttctgatgattccaatgtgttggaaagtttaccttgtctcagatgtaactggtaaaggctgatttctaaattttctgtaattgcagcaacctttctctcctgtctacccttttagtttactgtatgccatggttttgttttggttacattgaaagaaagttaatttggaaaatttgggagaaatctaatcatgcctattaaggatgtaagacattacagccttagaagaaagattgtgaaaagctggggagaaaatgcttaaggacatgctaggggaaaaaaaagtaaaattgaagtgctattgcagacatggctgcagtactgtaccttatcattctgatgaaactgatttggagcacccttttctttatcgctacatttatttaggggacaaactccatccaggttgactctctctggaatgcggtaataagagctggcaagtaaggctcagagagaagcaaccaactggagttaattgcccatttgggctctttgtataattatggcaaagtagacatttatgttctaattaatatgattacagagaaggctttttctcaggtcaggcttttcatgaaagtattttgagaacaatgaattgcaataaccagcttcacacaagcataactgataaacgcgagtgctattgtagtcttggcaagtgagccaagaacctaggagcagggccattcctactgaaggacgggccccctacggagatgaaatttgtttcctggtgagcacagaatcagaacaaagaacaatatcccaaagaggccctgtgtctaccaggagcttctttttccaaatgtaatggattatgtggaattgtagtgccatcggtttttacttagagcccttgacgtgcttggaccaatatttccttccttcttatgaaccaggtttttccttctgattttcccttttcaacattccttaccagtcaccaaagtttcctgttataatttcttttagcagacaagttataagtcagatttaattagcatcagagttgattttatattagtcagattttggatcatcacagagatctccacaactccttggcttaaacagctccaccggtaaaaaaaaaaaaaaaaaaaaaaaaaaaaaatagtttttttagagtagagttattttctgggagagttactacaaatgcttattctcattgacttatttctttcatggtaactttcgttttggagtgttcattttctgaacttgaccctcacattgtaggggtgcagtttgtccaactctttccaacagcccattagacaccactagctggatatttcacaggcatctttgattcaatatgtccaaagtggaactctccatctacctccctcacatgaacctgttcctctctcaggatctgtatgtaagtgaaaagcatcaccatctacccattggctcaagcagaaatctggaagtcatctttgactccttcctctccctcctgataaacatctaagcagtttctaagtctagttttacctcttaaatatctctgttcccttctaagttgtttgctgtgttttcttcagagcaagaaggttatattttttaaaatttacttagtaatgcacattcaaaacacacatcaagtcttcaggataaagttcaaaaccgctgtcatggccccatgtgatctctccctcccctacccctctatcatttagtttcttctgcgcaagccactctggcttcctttcagttttgtggttcccatttttagctagttcagtggttttcaatgggcatttctgcctttttttttctaaacgacaaatagaaatacatcttctttattatcctccaaatccaattcagaggtaatatgctccacctacacacaattttagaaataaattaaaaattaaataaaactaatatgaacataaagaggaaataaaaggtacctaacttgggcacagctgtaactgaagacctaatgaagtagtcagatgcttacaactatttataatgcatcaatttgaacttagaaggtaggagatcagatcatatgtgggaaaatgtaaaagcagggatatcagtgggcattagaataaaaactagggatacaataacttctttgcatatgacaatacttatttgtatataagagaaagaacgaaataacctttattgaaataaagatactatgcaagaaaatgtacagttgtcgaagtggagaaaatgaggatatattcttgcagacgagctataggtcatacatgaatgtctagtgagacattcaaaattcgtatagggtgcagagtaatttcttattgtgaggaactgtccaatgtattgcaagatgttctgcatacttggctctcacatactaaatgctagtagcgcccccacccccacgcccagtcacggtgacaaccacaaaccctatcagatctattcacctttttcagagcagatattttgtaacattctctttgctgacctgaaatgactcatagataatacaatctacttacacacatgaatttcttaaaaaaatcaatttaatgccctaactctcttattaaggagaaatagaaaagaagaaatttataatgaaaagaagatgaatttcattatgtaaacgctcaggcatgactacgctgtttgaaacagacagatgtttactcttccttgtaatgagtaggtttggatttaagagccgattagaggctacttcctgtaaacaagtacaggaaaatgaaactagacgggtgggggacactagaatgaaaaccagtgttagggtaaagacaaaacagactatgtacataatctgtatatgggaaaagaaagagcgaaattaccttacttaaggataataggacaagacaaattacagattgtctcagagaaaacaaatgagttactctctcggacaagctgtaggtcctacctaaatgtccagcaggacattagacagtcgtacagggtacagaataattcttcgttgtgtggcactaacccacacactgcaggacatcgttctccctggctgcatccactcagtgctgggagtagtccccagttattatgaaaccaccaataacccactgaccacagtgagaaccactgattttttccactgacctactgaatatctagcatccttagattggctcaactgttactttcctaaggagtccttctacagaataggtcagatcttggcctcccaaaccccttatttttaaaatactttgcgccttgctttgataatttgtattatgtatccaaactgaaattatctgctttctgcattagaatgtaagccccctgagggttgagtcagtctgtcttgtttgctgtgccacgcctgatgcccagcccagcagcatgctttgtacactgatatattgggtaaattttgttgaataaattaagctcaactatttgtatttcaatagttgagttgtattgcttcctgttcttcaagcttaatttgaactgtctaataaaaagaagtaattaaaaaaaaaaaaaaaaaaaaa

SEQ ID NO: 932 - protein, 902 aa, Human
MADPEVCCFITKILCAHGGRMALDALLQEIALSEPQLCEVLQVAGPDRFVVLETGGEAGITRSVVATTRARVCRRKYCQRPCDNLHLCKLNLLGRCNYSQSERNLCKYSHEVLSEENFKVLKNHELSGLNKEELAVLLLQSDPFFMPEICKSYKGEGRQQICNQQPPCSRLHICDHFTRGNCRFPNCLRSHNLMDRKVLAIMREHGLNPDVVQNIQDICNSKHMQKNPPGPRAPSSHRRNMAYRARSKSRDRFFQGSQEFLASASASAERSCTPSPDQISHRASLEDAPVDDLTRKFTYLGSQDRARPPSGSSKATDLGGTSQAGTSQRFLENGSQEDLLHGNPGSTYLASNSTSAPNWKSLTSWTNDQGARRKTVFSPTLPAARSSLGSLQTPEAVTTRKGTGLLSSDYRIINGKSGTQDIQPGPLFNNNADGVATDITSTRSLNYKSTSSGHREISSPRIQDAGPASRDVQATGRIADDADPRVALVNDSLSDVTSTTSSRVDDHDSEEICLDHLCKGCPLNGSCSKVHFHLPYRWQMLIGKTWTDFEHMETIEKGYCNPGIHLCSVGSYTINFRVMSCDSFPIRRLSTPSSVTKPANSVFTTKWIWYWKNESGTWIQYGEEKDKRKNSNVDSSYLESLYQSCPRGVVPFQAGSRNYELSFQGMIQTNIASKTQKDVIRRPTFVPQWYVQQMKRGPDHQPAKTSSVSLTATFRPQEDFCFLSSKKYKLSEIHHLHPEYVRVSEHFKASMKNFKIEKIKKIENSELLDKFTWKKSQMKEEGKLLFYATSRAYVESICSNNFDSFLHETHENKYGKGIYFAKDAIYSHKNCPYDAKNVVMFVAQVLVGKFTEGNITYTSPPPQFDSCVDTRSNPSVFVIFQKDQVYPQYVIEYTEDKACVIS

SEQ ID NO: 933 - DNA, 4145 bp, Human
caaacaagtgcggccatttcaccagcccaggctggcttctgctgttgactggctgtggcacctcaagcagcccctttcccctctagcctcagtttatcaccgcaagagctaccattcatctagcacaacctgaccatcctcacactggtcagttccaaccttcccaggaatcttctgtggccatgttcactccggttttacagaacagagaacagaagctcagagaagtgaagcaacttgcccagctatgagagacagagccaggatttgaaaccagatgaggacgctgaggcccagagagggaaagccacttgcctagggacacacagcggggagaggtggagcagggcctctatttcgagacccctgactccacacctggtgtttgtgccaagaccccaggctgcctcccaggtcctctgggacagcccctgccttctaccaggaccatgggtagcaacaagagcaagcccaaggatgccagccagcggcgccgcagcctggagcccgccgagaacgtgcacggcgctggcgggggcgctttccccgcctcgcagacccccagcaagccagcctcggccgacggccaccgcggccccagcgcggccttcgcccccgcggccgccgagcccaagctgttcggaggcttcaactcctcggacaccgtcacctccccgcagagggcgggcccgctggccggtggagtgaccacctttgtggccctctatgactatgagtctaggacggagacagacctgtccttcaagaaaggcgagcggctccagattgtcaacaacacagagggagactggtggctggcccactcgctcagcacaggacagacaggctacatccccagcaactacgtggcgccctccgactccatccaggctgaggagtggtattttggcaagatcaccagacgggagtcagagcggttactgctcaatgcagagaacccgagagggaccttcctcgtgcgagaaagtgagaccacgaaaggtgcctactgcctctcagtgtctgacttcgacaacgccaagggcctcaacgtgaagcactacaagatccgcaagctggacagcggcggcttctacatcacctcccgcacccagttcaacagcctgcagcagctggtggcctactactccaaacacgccgatggcctgtgccaccgcctcaccaccgtgtgccccacgtccaagccgcagactcagggcctggccaaggatgcctgggagatccctcgggagtcgctgcggctggaggtcaagctgggccagggctgctttggcgaggtgtggatggggacctggaacggtaccaccagggtggccatcaaaaccctgaagcctggcacgatgtctccagaggccttcctgcaggaggcccaggtcatgaagaagctgaggcatgagaagctggtgcagttgtatgctgtggtttcagaggagcccatttacatcgtcacggagtacatgagcaaggggagtttgctggactttctcaagggggagacaggcaagtacctgcggctgcctcagctggtggacatggctgctcagatcgcctcaggcatggcgtacgtggagcggatgaactacgtccaccgggaccttcgtgcagccaacatcctggtgggagagaacctggtgtgcaaagtggccgactttgggctggctcggctcattgaagacaatgagtacacggcgcggcaaggtgccaaattccccatcaagtggacggctccagaagctgccctctatggccgcttcaccatcaagtcggacgtgtggtccttcgggatcctgctgactgagctcaccacaaagggacgggtgccctaccctgggatggtgaaccgcgaggtgctggaccaggtggagcggggctaccggatgccctgcccgccggagtgtcccgagtccctgcacgacctcatgtgccagtgctggcggaaggagcctgaggagcggcccaccttcgagtacctgcaggccttcctggaggactacttcacgtccaccgagccccagtaccagcccggggagaacctctaggcacaggcgggcccagaccggcttctcggcttggatcctgggctgggtggcccctgtctcggggcttgccccactctgcctgcctgctgttggtcctctctctgtggggctgaattgccaggggcgaggcccttcctctttggtggcatggaaggggcttctggacctagggtggcctgagagggcggtgggtatgcgagaccagcacggtgactctgtccagctcccgctgtggccgcacgcctctccctgcactccctcctggagctctgtgggtctctggaagaggaaccaggagaagggctggggccggggctgagggtgcccttttccagcctcagcctactccgctcactgaactccttccccacttctgtgccacccccggtctatgtcgagagctggccaaagagcctttccaaagaggagcgatgggcccctggccccgcctgcctgccaccctgccccttgccatccattctggaaacacctgtaggcagaggctgccgagacagaccctctgccgctgcttccaggctgggcagcacaaggccttgcctggcctgatgatggtgggtgggtgggatgagtaccccctcaaaccctgccctccttagacctgagggacccttcgagatcatcacttccttgcccccatttcacccatggggagacagttgagagcggggatgtgacatgcccaaggccacggagcagttcagagtggaggcgggcttggaacccggtgctccctctgtcatcctcaggaaccaacaattcgtcggaggcatcatggaaagactgggacagcccaggaaacaaggggtctgaggatgcattcgagatggcagattcccactgccgctgcccgctcagcccagctgttgggaacagcatggaggcagatgtggggctgagctggggaatcagggtaaaaggtgcaggtgtggagagagaggcttcaatcggcttgtgggtgatgtttgaccttcagagccagccggctatgaaagggagcgagcccctcggctctggaggcaatcaagcagacatagaagagccaagagtccaggaggccctggtcctggcctccttccccgtactttgtcccgtggcatttcaattcctggccctgttctcctccccaagtcggcaccctttaactcatgaggagggaaaagagtgcctaagcgggggtgaaagaggacgtgttacccactgccatgcaccaggactggctgtgtaaccttgggtggcccctgctgtctctctgggctgcagagtctgccccacatgtggccatggcctctgcaactgctcagctctggtccaggccctgtggcaggacacacatggtgagcctagccctgggacatcaggagactgggctctggctctgttcggcctttgggtgtgtggtggattctccctgggcctcagtgtgcccatctgtaaaggggcagctgacagtttgtggcatcttgccaagggtccctgtgtgtgtgtatgtgtgtgcatgtgtgcgtgtctccatgtgcgtccatatttaacatgtaaaaatgtcccccccgctccgtcccccaaacatgttgtacatttcaccatggccccctcatcatagcaataacattcccactgccaggggttcttgagccagccaggccctgccagtggggaaggaggccaagcagtgcctgcctatgaaatttcaacttttcctttcatacgtctttattacccaagtcttctcccgtccattccagtcaaatctgggctcactcaccccagcgagctctcaaatccctctccaactgcctaaggccctttgtgtaaggtgtcttaatactgtcctttttttttttttaacagtgttttgtagatttcagatgactatgcagaggcctgggggacccctggctctgggccgggcctggggctccgaaattccaaggcccagacttgcggggggtgggggggtatccagaattggttgtaaatactttgcatattgtctgattaaacacaaacagacctcagaaaaaaaaaaaaaaaaaaaaaaaaaaaaaaaaaaaaaaaaaaaaaaaa

SEQ ID NO: 934 - DNA, 518 bp, Human
  unsure 159: unknown base
  unsure 160: unknown base
  unsure 161: unknown base
  unsure 162: unknown base
  unsure 163: unknown base
  unsure 164: unknown base
  unsure 165: unknown base
  unsure 166: unknown base
ttcttctatccaactctcttatgaaaaggaactctgtattttctattagccataaataatctgtccactgtattttacaggtcttcatacttttacttaattttctttatctgtatggcaaaccactgcaatcctgaatgacatggaaagcatcacaannnnnnnncctttgcttgaattcctggaatgcatacatataagctaaacagatgtctgcagttataaatgtcataagtagaggtacaatctcaccctgctccttagaaacatttccatataaatcgctaaaataatttcacatttttgttagtttaatatatacatgagtttatttctgatataaataataaatacagagagtgagcatatcagagaggcaaattcttaaagaatgatttttaaaatcagctctaggaagagctcaagatcaattggtcatagaacagcatttgacgcctagaactatgaccacctcatggtcagagatgagaatgtagcctttgtgaccagattatatt

SEQ ID NO: 935 - DNA, 4396 bp, Human
gcctgaggtgcccgccctggccccaggagaatgaaccagccgcagaggatggcgcctgtgggcacagacaaggagctcagtgacctcctggacttcagcatgatgttcccgctgcctgtcaccaacgggaagggccggcccgcctccctggccggggcgcagttcggaggttcaggtcttgaggaccggcccagctcaggctcctggggcagcggcgaccagagcagctcctcctttgaccccagccggaccttcagcgagggcacccacttcactgagtcgcacagcagcctctcttcatccacattcctgggaccgggactcggaggcaagagcggtgagcggggcgcctatgcctccttcgggagagacgcaggcgtgggcggcctgactcaggctggcttcctgtcaggcgagctggccctcaacagccccgggcccctgtccccttcgggcatgaaggggacctcccagtactacccctcctactccggcagctcccggcggagagcggcagacggcagcctagacacgcagcccaagaaggtccggaaggtcccgccgggtcttccatcctcggtgtacccacccagctcaggtgaggactacggcagggatgccaccgcctacccgtccgccaagacccccagcagcacctatcccgcccccttctacgtggcagatggcagcctgcacccctcagccgagctctggagtcccccgggccaggcgggcttcgggcccatgctgggtgggggctcatccccgctgcccctcccgcccggtagcggcccggtgggcagcagtggaagcagcagcacgtttggtggcctgcaccagcacgagcgtatgggctaccagctgcatggagcagaggtgaacggtgggctcccatctgcatcctccttctcctcagcccccggagccacgtacggcggcgtctccagccacacgccgcctgtcagcggggccgacagcctcctgggctcccgagggaccacagctggcagctccggggatgccctcggcaaagcactggcctcgatctactccccggatcactcaagcaataacttctcgtccagcccttctacccccgtgggctccccccagggcctggcaggaacgtcacagtggcctcgagcaggagcccccggtgccttatcgcccagctacgacgggggtctccacggcctgcagagtaagatagaagaccacctggacgaggccatccacgtgctccgcagccacgccgtgggcacagccggcgacatgcacacgctgctgcctggccacggggcgctggcctcaggtttcaccggccccatgtcgctgggtgggcggcacgcaggcctggttggaggcagccaccccgaggacggcctcgcaggcagcaccagcctcatgcacaaccacgcggccctccccagccagccaggcaccctccctgacctgtctcggcctcccgactcctacagtgggctagggcgagcaggtgccacggcggccgccagcgagatcaagcgggaggagaaggaggacgaggagaacacgtcagcggctgaccactcggaggaggagaagaaggagctgaaggccccccgggcccggaccagcccagacgaggacgaggacgaccttctccccccagagcagaaggccgagcgggagaaggagcgccgggtggccaataacgcccgggagcggctgcgggtccgtgacatcaacgaggcctttaaggagctggggcgcatgtgccaactgcacctcaacagcgagaagccccagaccaaactgctcatcctgcaccaggctgtctcggtcatcctgaacttggagcagcaagtgcgagagcggaacctgaatcccaaagcagcctgtttgaaacggcgagaagaggaaaaggtgtcaggtgtggttggagacccccagatggtgctttcagctccccacccaggcctgagcgaagcccacaaccccgccgggcacatgtgaaaggtatgcctccgtgggacgagccacccgctttcagccctgtgctctggccccagaagccggactcgagaccccgggcttcatccacatccacacctcacacacctgttgtcagcatcgagccaacaccaacctgacaaggttcggagtgatgggggcggccaaggtgacactgggtccaggagctccctggggccctggcctaccactcactggcctcgctccccctgtccccgaatctcagccaccgtgtcactctgtgacctgtcccatggatcctgaaactgcatcttggccctgttgcctgggctgacaggagcattttttttttttccagtaaacaaaacctgaaagcaagcaacaaaacatacactttgtcagagaagaaaaaaatgccttaactataaaaagcggagaaatggaaacatatcactcaagggggatgctgtggaaacctggcttattcttctaaagccaccagcaaattgtgcctaagcgaaatattttttttaaggaaaataaaaacattagttacaagattttttttttcttaaggtagatgaaaattagcaaggatgctgcctttggtctctggtttttttaagctttttttgcatatgttttgtaagcaacaaatttttttgtataaaagtcccgtgtctctcgctatttctgctgctgttcctagactgagcattgcatttcttgatcaaccagatgattaaacgttgtattaaaaagaccccgtgtaaacctgagccccccccgtccccccccccggaagccactgcacacagacagacggggacaggcggcgggtcttttgtttttttgatgttgggggttctcttggttttgtcatgtggaaagtgatgcgtgggcgttccctgatgaaggcaccttggggcttccctgccgcatcctctcccctcaggaaggggactgacctgggcttgggggaagggacgtcagcaaggtggctctgaccctcccaggtgactctgccaagcagctgtggccccagcggtaccctacacaacgccctccccaggcccccctaagctgctctcccttggaacctgcacagctctctgaaatggggcattttgttgggaccagtgacccctggcatggggaccacaccctggagcccggtgctggggacctcctggacaccctgtccttcactccttgccccagggacccaggctcatgctctgaactctggctgagaggagtctgctcaggagccagcacaggacaccccccaccccaccccaccatgtccccattacaccagagggccatcgtgacgtagacaggatgccaggggcctgaccagcctccccaatgctggggagcatccctggcctggggccacacctgctgccctccctctgtgtggtccaagggcaagagtggctggagccgggggactgtgctggtctgagccccacgaaggccttgggctgtggctccgaccctgctgcagaaccagcagggtgtcccctcgggcccatctgtgtcccatgtcccagcacccaggcctctctccaggtctccttttctggtcttttgccatgagggtaaccagctcttcccagctggctgggactgtcttgggtttaaaactgcaagtctcctaccctgggatcccatccagttccacacgaactagggcagtggtcactgtggcacccaggtgtgggcctggctagctgggggccttcatgtgcccttcatgcccctccctgcattgaggccttgtggacccctgggctggctgtgttcatccccgctgcaggtcgggcgtctccccccgtgccactcctgagactccaccgttacccccaggagatcctggactgcctgactcccctccccagactggcttgggagcctgggccccatggtagatgcaagggaaacctcaaggccagctcaatgcctggtatctgcccccagtccaggccaggcggaggggaggggctgtccggctgcctctcccttctcggtggcttcccctgcgccctgggagtttgatctcttaagggaacttgcctctccctcttgttttgctcctgccctgcccctaggtctgggtggcagtggccccatagcctctggaactgtgcgttctgcatagaattcaaacgagattcacccagcgcgaggaggaagaaacagcagttcctgggaaccacaattatggggggtggggggtgtgatctgagtgcctcaagatggttttcaaaaaattttttttaaagaaaataattgtatacgtgtcaacacagctggctggatgattgggactttaaaacgaccctctttcaggtggattcagagacctgtcctgtatataacagcactgtagcaataaacgtgacattttataaag

SEQ ID NO: 936 - protein, 654 aa, Human
MNQPQRMAPVGTDKELSDLLDFSMMFPLPVTNGKGRPASLAGAQFGGSGLEDRPSSGSWGSGDQSSSSFDPSRTFSEGTHFTESHSSLSSSTFLGPGLGGKSGERGAYASFGRDAGVGGLTQAGFLSGELALNSPGPLSPSGMKGTSQYYPSYSGSSRRRAADGSLDTQPKKVRKVPPGLPSSVYPPSSGEDYGRDATAYPSAKTPSSTYPAPFYVADGSLHPSAELWSPPGQAGFGPMLGGGSSPLPLPPGSGPVGSSGSSSTFGGLHQHERMGYQLHGAEVNGGLPSASSFSSAPGATYGGVSSHTPPVSGADSLLGSRGTTAGSSGDALGKALASIYSPDHSSNNFSSSPSTPVGSPQGLAGTSQWPRAGAPGALSPSYDGGLHGLQSKIEDHLDEAIHVLRSHAVGTAGDMHTLLPGHGALASGFTGPMSLGGRHAGLVGGSHPEDGLAGSTSLMHNHAALPSQPGTLPDLSRPPDSYSGLGRAGATAAASEIKREEKEDEENTSAADHSEEEKKELKAPRARTSPDEDEDDLLPPEQKAEREKERRVANNARERLRVRDINEAFKELGRMCQLHLNSEKPQTKLLILHQAVSVILNLEQQVRERNLNPKAACLKRREEEKVSGVVGDPQMVLSAPHPGLSEAHNPAGHM

SEQ ID NO: 937 - DNA, 524 bp, Human
  unsure 91: unknown base
  unsure 180: unknown base
  unsure 272: unknown base
ggctgtgcacagttcaccgagaagctgacttcttctggagcctgtgtactgcggacatgtccctgctggagcagtctcacagctcaccatncctgtacctgcagtgcctctcccagaaactgagacaagaaagaaaacgcccactcctggatcttcacattgaactcaatggctacatgnatgattggaacagcagagtttctgccaaggagaaatattatgtctggctgcagcacactctgagaaagaaacttatcctctcctacacatanttcagcgtctgacgtcagacgctgaactatgtggtcatgaggatgcccagaatcagggcccagatgttcaggcacttggcggtggaggcataggcctgggccccggtcacgtcgccaaccatcttcctgtccctagacttcacggagtaggcgaatgctatgaagcccaggcagcaggggttcatgaagagggtgttgaacagggaccagacgacatggtcgggcacggaggtctcgctgcggatgtggatc

SEQ ID NO: 938 - DNA, 518 bp, Human
ccctctggttgtgtggccagcatgtttttctagccaaaggacttgggatgagatttttcatggaatattgagagagacgtaattgttattagaatcagttctgtttttatttattattattatttgaaacagagtctcactctgtcgcccaggctggagtgtactgtcacaatcttggctcactgcaacctccgcctcccaggttcaagcaatcctcctgcctcagcctcccgagtagccgggattacaggcgcgtgccgccatgcccggctaatttttgtatttttagtagagatggggttttgtcatgttggccaggctggtctcaaaaactcctgacctcaggtgatccgcccaccttggcctcccaaagtgctgggattacatgcttgagctaccatacctggctaatttttgtatttttagtagagatggggttttgccatgttggctgggctggtcttgaactcctgatttcaggtgatccacttgcctcgacctcccaaagtgctagaatt

SEQ ID NO: 939 - DNA, 1386 bp, Human
ggaagccgggattcgccctccggggagcgattggtcctcgggaggggcggggaggtggacgcgggtaccggcggtcgtcgggtcggcagcctttggtcagttggcagcggcaagcgcgctgcggttccggtggcgccatgtcgttctgcagcttcttcgggggcgaggttttccagaatcactttgaacctggcgtttacgtgtgtgccaagtgtggctatgagctgttctccagccgctcgaagtatgcacactcgtctccatggccggcgttcaccgagaccattcacgccgacagcgtggccaagcgtccggagcacaatagatctgaagccttgaaggtgtcctgtggcaagtgtggcaatgggttgggccacgagttcctgaacgacggccccaagccggggcagtcccgattctgaatattcagcagctcgctgaagtttgtccctaaaggcaaagaaacttctgcctcccagggtcactaggcgggcagcccacacccaccccagacggccaccacactgaggccacacgttggccattccaccttggagttggaaccctgggcgtcgagacaggaaggcagggcgcagtggttgaaacatcaggacactcccaaggccccggctctgaacaagaccttttcgtttcttggaaaagagactcatttgctgatggttcatgccttctgctgggacaggcctgggctgtgcagccacactgtcggctgacttagccccctgctcactctaggtgcctccaggaggtgagccctgggtgcagctggtctctgaatgacgttacaccctcaccttcttttcctggccctgtctctggactctcccctgtgaggcccaattccaagacagactctcgtcctcaccgaagcttaggcccacatctcccaggctgcttaggagacagaatggaaacggaggccgcccctgccagccgccctggccctggtcactgcatgatccgctctggtcaaacccttccaggccagccagagtggggatggtctgtgacctgctgggaaggcaggctgatggggcacacccttggcctctcgtccacgaggggagaaacctaaaccctgtttcacaatctgtgcggaagtagcttgcctcacttctgcttaggaaagcggctgttgctccataactctaaccagcacagggctgaggcctgcagtgcacacctgcagggaggcccttcccaaggtgtggtgactgtgccttactgtacatgctcggaggcctggccatataggagggtgggtgatgctgaaatcaccccccatcttaagtaattactttctggagtaatcaggtggaaatccatagacaaatgaaacattcagaaaaaaaaaaaaaaaaaaaa

SEQ ID NO: 940 - DNA, 2974 bp, Human
gcccctgcctcggccagaggtttcatttttaactgaatatttacgaaagctggaagcgtgcgaggggggtggggtggggtggaaatagcggctgcttcttttccagggatttatttaatggggatgtgttcaaggcaagagcgaattcagaaggatatcgacgtcgtgatccagaagtccagagctgagaaggactgcctgtttgcagatttcagatactctgactccacctttacttttacctacgttggcggccccagaagtgtatcctactcagtacatgtatctgaagattacccagataatacatatgtgtcaagttcagagaatgatgaagatgtgctagttactacagagccaataccagtaatttttcatagaatagcaacagaattaagaaaaacaaatgacattaactgttgcttatccataaaatccaaattacaaaaggaaaatggggaggaatcaagacagaatagtacagtggaggaagattctgaaggtgacaatgattccgaagaattttattacggaggacaggtgaactatgatggggaactgcacaagcacccacaactggaagctgatttgtcagcagttagagagatatatgggccacatgcagtttctctcagggaatatggagccattgatgatgtagatattgatctgcatatcgatgttagctttcttgatgaggagattgctgtggcttgggaagtaattcgaacagaacctataattgttcgactacactgttcacttacacagtatttaaatggcccagtgcccactgttgatgtctttcagatttccacaaaagagcgatttggattgggacatcagctgaaaaaaatcatgcagacatttgttacacagcagtggaaacagagcaaagaaaaatccaattgcctgcacaataaaaagttgtcagagaagaaagtgaagtctcccctgcatttattttctactttgcgcaggtcgccaagttatcctccccctggttgtggcaaaagcaaatccaaactgaaatctgagcaggacggaatctccaaaacgcataagctgctgcggaggacttgttccagcacagtcaagactgatgatgtgtgtgtcacaaagtcacacaggacctttggccgctccttgtccagcgatcccagggcggagcaggctatgacagcaattaaatcgcacaaacttttgaaccgtccttgccctgcagctgttaagtcagaggaatgcctaactctaaagtcgcatagactattgactcgatcttgttctggagatccacgatgtgagcacaacacaaacttgaagccccataaactgttaagcaggtcttactctagtaatctcagaatggaagaattatatggactgaaaaatcacaaattgctcagcaagtcctactccagtgcccccaagtcatccaaaactgagcttttcaaggaacctaacgcagagggcaggaggctctctcttacctcagggcttattggtatcctaacaccatcttcatcttcatcttctcagcttgctccaaatggtgcaaaatgcattccagtacgagaccgtggcttcctggtgcagacaattgagtttgctgaacagcggatccctgtattaaatgaatattgtgtggtttgtgatgagccacatgtgtttcaaaatggccctatgcttaggcctaccgtatgtgaacgggagctgtgtgtgtttgcttttcaaaccctgggagtaatgaatgaagctgctgatgaaatagcaactggagctcaggtggtagatctactagtatccatgtgtaggtctgcgttggaatctcctagaaaagttgtgattttcgagccatatccttctgtggtagatcctaatgatcctcagatgttggccttcaaccccaggaaaaagaactatgatcgagtaatgaaagcactggatagcataacttctatcagagaaatgacacaagcaccatatctggaaatcaagaagcaaatggataaacaggacccccttgctcatcccttactgcaatgggttatatcaagtaatagatcacatattgtgaaactgccagttaacaggcaattgaagtttatgcatactccacatcagttccttcttctcagcagtccaccagccaaagaatccaattttagagctgctaaaaaactctttggaagcacctttgcatttcatggctcacacattgaaaactggcactccatcctgaggaatggtctggttgttgcttctaatacacgattgcagctccatggtgcaatgtatggaagtggaatctatcttagtccaatgtcaagcatatcatttggttactcagggatgaacaagaaacagaaggtgtcagccaaggacgagccagcttcaagcagtaaaagcagcaatacatcacagtcacagaaaaaaggacagcaatcccaattcctgcaaagccgtaacttaaaatgcatagccttatgtgaagtgatcacctcatctgacctgcacaaacatggagagatatgggttgtccccaatactgaccatgtctgcacacgattctttttcgtctatgaagacggccaagtgggagatgcaaatattaatacacaagaaggaggcattcacaaagagatcctccgagtaattggtaatcaaactgctactggttaaaggaccaccatttaattaacatgattcgaaagccttcctcgggttcaaagctggattttgaactgaagaagattataaaattatttattgttattataaacaaaattaaccctttgaatactgattttttttcttagtatttctaagtatctcattaaatacctaaaatggtataagatttatcaattgtagggttatggaatctagtaataaaatttcaacagcacttaaactgaagtttgggttgctcatacaataaacagattgaaaaaacaaaaaaaaaaaaaaaaag

SEQ ID NO: 941 - protein, 854 aa, Human
MGMCSRQERIQKDIDVVIQKSRAEKDCLFADFRYSDSTFTFTYVGGPRSVSYSVHVSEDYPDNTYVSSSENDEDVLVTTEPIPVIFHRIATELRKTNDINCCLSIKSKLQKENGEESRQNSTVEEDSEGDNDSEEFYYGGQVNYDGELHKHPQLEADLSAVREIYGPHAVSLREYGAIDDVDIDLHIDVSFLDEEIAVAWEVIRTEPIIVRLHCSLTQYLNGPVPTVDVFQISTKERFGLGHQLKKIMQTFVTQQWKQSKEKSNCLHNKKLSEKKVKSPLHLFSTLRRSPSYPPPGCGKSKSKLKSEQDGISKTHKLLRRTCSSTVKTDDVCVTKSHRTFGRSLSSDPRAEQAMTAIKSHKLLNRPCPAAVKSEECLTLKSHRLLTRSCSGDPRCEHNTNLKPHKLLSRSYSSNLRMEELYGLKNHKLLSKSYSSAPKSSKTELFKEPNAEGRRLSLTSGLIGILTPSSSSSSQLAPNGAKCIPVRDRGFLVQTIEFAEQRIPVLNEYCVVCDEPHVFQNGPMLRPTVCERELCVFAFQTLGVMNEAADEIATGAQVVDLLVSMCRSALESPRKVVIFEPYPSVVDPNDPQMLAFNPRKKNYDRVMKALDSITSIREMTQAPYLEIKKQMDKQDPLAHPLLQWVISSNRSHIVKLPVNRQLKFMHTPHQFLLLSSPPAKESNFRAAKKLFGSTFAFHGSHIENWHSILRNGLVVASNTRLQLHGAMYGSGIYLSPMSSISFGYSGMNKKQKVSAKDEPASSSKSSNTSQSQKKGQQSQFLQSRNLKCIALCEVITSSDLHKHGEIWVVPNTDHVCTRFFFVYEDGQVGDANINTQEGGIHKEILRVIGNQTATG

SEQ ID NO: 942 - DNA, 4449 bp, Human
ctcctccgctccctgcgctcccgccacctcggcaactccgcgcccgcctcccgcctccgtcggaagcctccgccgcagtaaggctcccggtctcgctgctgtctctttaaatggtggggctacgagccgcccctgcagctgctccctgggtggccccgcgcgccgcttttgaggggcgaaccaagatggcggcggttttggctgtgtgaggaagacggaagagacggcggcggagggaaaccgacttccactagtccgggtcgcttgggcggccgggggccctcagagtctcccgggcagtggtagcagttgcagcaggatcaggcgcctgtcggcttctgacgtttaaaacagggggagcggaagggagccactggccgcggtggcagggccaggtataaggaaggaaaatatggcggcggcggcggcggcctgaggaggcggcggcggcgcgggaagctgcttcgcggagatcatggcggaggcgggagcagggcagtgacgggagccccgagttcctagcgctgcggggcgggaggctacgaagcgctgcgcggccccctcggggctgccgggcgccgggctcgccaggcctggacaatagcgccggggagccggaggcgaggaaaggcggcggcccagagctcggtccctggagcgggccatgcaggcggcggcgcggccccgcggcgcccagcggcggcagtgaggccggggagccctccgctcgcgggcgccctcacgcctcgcccctcgcctctccagggcccctttcctgggcgtctactggcggggcccccgccccggttcccgggcggcacgatgaccgacacccggcggcgggtgaaggtgtacacgctcaacgaggaccggcagtgggacgaccggggcaccgggcatgtgtcgtctggctacgtggagcggctgaagggcatgtccctgcttgtcagggctgagagcgacggttctctacttttagagtcgaaaataaatcctaacactgcataccagaaacaacaggacactctgattgtgtggtctgaagcagaaaattatgacttggcccttagctttcaagaaaaagctggatgtgatgaaatttgggagaaaatatgtcaggttcaaggaaaggacccttccgtggacatcactcaggaccttgtggatgaatctgaagaggagcgttttgatgatatgtcatcgccaggcttagaattgccatcttgtgaattaagtcgccttgaagaaattgcagaacttgtggcatcatctttaccttcacctcttcgtcgtgaaaaacttgcactggcactagaaaatgagggttatattaaaaagctcctggagctttttcatgtgtgtgaagatttggaaaatattgaaggactgcaccacttgtatgaaattatcaaaggcatctttctcttgaatcgaactgctctttttgaagttatgttctctgaagaatgtataatggacgtcattggatgtttagaatatgatcctgctttatcacaaccacgaaaacacagggaatttctaacaaaaacagccaagtttaaagaagtgattcccatatcagatcctgagctgaaacaaaaaattcatcagacatacagagttcagtatatacaagatatggttctaccaactccttcggtctttgaagaaaacatgttatcaacacttcactcttttatctttttcaataaggtagagattgttggcatgttgcaggaagatgaaaaatttctgacagatttgtttgcacaactaacagatgaagcaacagatgaggaaaaaagacaggaattggttaactttttaaaagaattttgtgcgttttcccaaacgctacagcctcaaaacagagatgcttttttcaagactttgtcaaacatgggcatattaccagctttagaagtcatccttggcatggatgatacacaggtgcgaagtgctgctactgatatattctcatacttggttgaatataatccatccatggtacgagagtttgtcatgcaggaggcacaacagaatgatgatgatattttgctcatcaacctcattatagaacatatgatttgtgatacagatcctgaacttggaggagcagtccagcttatgggcctgctacgaactttagttgacccagagaacatgctagccactgccaataaaacagaaaagactgaatttctgggtttcttctacaagcactgtatgcatgttctcactgctcctttactagcaaatacaacagaagacaaacctagtaaagatgattttcagactgcccaactattggcacttgtattggaattgttaacattttgtgtggagcaccatacctaccacataaagaactacattattaataaggatatcctccggagagtgctagttcttatggcctcgaagcatgctttcttggcattatgtgcccttcgttttaaaagaaagattattggattaaaagatgagttttacaaccgctacataatgaaaagttttttgtttgaaccagtagtgaaagcatttctcaacaatggatcccgctacaatctgatgaactctgccataatagagatgtttgaatttattagggtggaagatataaaatcattaactgctcatgtaattgaaaattactggaaagcactggaagatgtagattatgtacagacatttaaaggattaaaactgagatttgaacaacaaagagaaaggcaagataatcccaaacttgacagtatgcgttccattttgaggaatcacagatatcgaagagatgccagaacactagaagatgaagaagagatgtggtttaacacagatgaagatgacatggaagatggagaagctgtagtgtctccatctgacaaaactaaaaatgatgatgatattatggatccaataagtaaattcatggaaaggaagaaattaaaagaaagtgaggaaaaggaagtgcttctgaaaacaaacctttctggacggcagagcccaagtttcaagctttccctgtccagtggaacgaagactaacctcaccagccagtcatctacaacaaatctgcctggttctccgggatcacctggatccccaggatctccaggctctcctggatccgtacctaaaaatacatctcagacggcagctattactacaaagggaggcctcgtgggtctggtagattatcctgacgatgatgaagatgatgatgaggatgaagataaggaagatacgttaccattgtcaaagaaagcaaaatttgattcataataatggcaacggcctaggatcagtacctgttgaaaaaaactggttctccacccctcccccatacaaaatccacaaaaaagcgcagtggtctcttgtgaatgactgacacagatcagcctcttacacttgacttctgctcatcaagtgccaattcaatggagcaggaggaggggatatcatatatttaggggaaagacttaagcctttgagctctccagcttggaccacacattgcccttttctcagggaaggaaatggaaacaaaaagccaacagggcaggggttttgtaagtggaactctggattgactggtcagttgctacaatcagaatatgctttcttggaccatgtttgagactcagaagaatgggcctttctgccataattcttcactagtcaagaatgccagcagtttctttgtataaagagacctgcctttaaaatcatacattctgaacattttagtcaagctacaacaggtttggaaaacctctgtgggggaggggcgagtataaagttttcctcttttttaactgttccctttgcccttcaaactgcagatatttttttttttaagtggggacttctccctacttgattaaagattgagtggaattctagatgtggtcatttgtgtcataatttttttgttttattttgtttttgattttttttttcctcccctgagtgtatgcttagttgttgagtatatatatttgggaccattaaaactttttttgatgtaatataacctaacgttgtgctggtacctgttttaccatgtgtaatttttgttctacatcacagttcttaatttgtttagagttttatgaaagatggtatagtttttattgacaaaagcaaagtaatcttacaactatgtgcatacaaaagcaatactattttgtgactaaatattttatattaaaatttacatcagcaactgtcttgagaattcagggaaatagaatggaatttaaaacttcaacagttttgttaaatctagaaacatgaaattagtattccaaagagattctgaaatttcttttcttggggaaatgacggtacattaaatcaaaattgaggatggatgatttaaaaacatttgactttttaataataaaaagaaaagtgaagagtaagagaaaaaaaaaaaaaaaaaaa

SEQ ID NO: 943 - protein, 820 aa, Human
MTDTRRRVKVYTLNEDRQWDDRGTGHVSSGYVERLKGMSLLVRAESDGSLLLESKINPNTAYQKQQDTLIVWSEAENYDLALSFQEKAGCDEIWEKICQVQGKDPSVDITQDLVDESEEERFDDMSSPGLELPSCELSRLEEIAELVASSLPSPLRREKLALALENEGYIKKLLELFHVCEDLENIEGLHHLYEIIKGIFLLNRTALFEVMFSEECIMDVIGCLEYDPALSQPRKHREFLTKTAKFKEVIPISDPELKQKIHQTYRVQYIQDMVLPTPSVFEENMLSTLHSFIFFNKVEIVGMLQEDEKFLTDLFAQLTDEATDEEKRQELVNFLKEFCAFSQTLQPQNRDAFFKTLSNMGILPALEVILGMDDTQVRSAATDIFSYLVEYNPSMVREFVMQEAQQNDDDILLINLIIEHMICDTDPELGGAVQLMGLLRTLVDPENMLATANKTEKTEFLGFFYKHCMHVLTAPLLANTTEDKPSKDDFQTAQLLALVLELLTFCVEHHTYHIKNYIINKDILRRVLVLMASKHAFLALCALRFKRKIIGLKDEFYNRYIMKSFLFEPVVKAFLNNGSRYNLMNSAIIEMFEFIRVEDIKSLTAHVIENYWKALEDVDYVQTFKGLKLRFEQQRERQDNPKLDSMRSILRNHRYRRDARTLEDEEEMWFNTDEDDMEDGEAVVSPSDKTKNDDDIMDPISKFMERKKLKESEEKEVLLKTNLSGRQSPSFKLSLSSGTKTNLTSQSSTTNLPGSPGSPGSPGSPGSPGSVPKNTSQTAAITTKGGLVGLVDYPDDDEDDDEDEDKEDTLPLSKKAKFDS

SEQ ID NO: 944 - DNA, 2365 bp, Human
aaaaagacctactttgtgagagagtatagtgtcctccatgatgtcaacctcaatgaatcagataggtcccaagccatatctgtgggttaataatccatcatgaatcaattgccattaacttgccaagaactttttttcaatttcagtttgaagtttcactcttctgtgtgcttatttgtttgttggtttgttatgttttagccactgtaggcttctagagagaataaccattcctttcctggcccacgccctttccagtttgctttccagggtagagttactaattaaattccagacacttattaacaaacttttattactagacaggatcatgcacatggatgtaactccttttagctccatcttttcctcactccctctgattggttggtatgaccaaagggccattgtccagttccatatagggaagggatctgtggggtcttgctggctagctccctcacccttccaccttctcactctctccatgcattatgtatgcttcacatgggccttgctcatgtgaaacgaatgcccaggagttcaaggttgcagtgcaaggaggcccaagcattcttctctttgcaatctggtacttacagggttctaagtactccattaaaactgggtgtgtgggaggagaagaaacactgggcagctctcctacaaccagtatccctaggaaggaaatggaagaaaagaccctgtaatttggatgactatgtatggggacagctgaaatacataccacttaagttctccttcactgctgctgctgctgatcggcaatgtgtgaaagcagctgagccaggagagcccagcatgcacgcggctgccactgcaatggcaggtaccagggccggtactacatttgatgaattacaatgccaagaagacatggtttgtaccaggtttgaaaacaaggcctatgtgaataccaatgactttacgagacaataaggaaaaacaacgtagactgagttccccatctagtgacacccacagccctagcttcctccttaagcccctcagactgttttatctctgaactggttagtgaagacttaaaaacatagtcctgcaggttgactaagaaaaatctttaagaatggcaactggtgggtgttaccttcactcactgcaagatctgccgtatatatggtttaaaaagaattttaaaagttagttaaggtcaatcatggtggctcacacctataattttagagctttgggaggtcgagaagcacgaggattgcttgaggccaggagttcaatatcagtttgggcaatatggcgagacctcatctctacaaaattaaattagctggggtggtggcacacgtctgtagtcctagctactcaggaggctgaggcaggaggatcgcttgagcccagaagttcaagggtgcagtgagctatgattgcaccattgcacctccagcctgggcaacagagtgagactctgtcaaaaaaaaaaaaaaaaaaagttggtagggaaaagctaacaagagacttttgaaaatagaaaatagagtaaatagcattattcaagacacagaaagaaagcaggaaagcatatttgtgagaaataattattaaaggggctaggcacagtggctcacacctgtaatcccagcactttggtaggccaagatggctggatcacctgaggtcaggcgttcaataccagcctggccaacatggtgaaaccccgtctctactaaaaatacaaaaaattagccgagatggctggatcatctgaggtcaggagttcaataccagcctggccaacgtggtgaaaccccgtgtactaaaatataaaatacaaaaaattagctgggattacaggcacacaccacaatgccaggctatttttttgtattttcagtagagacagggcttttgccatgtcgcccaggctggtctcgaactcctgagctcaggcaatccactccccctttggcctcccaaagtgctgggattacaggcgccaccgcgcctggccaaaaggcatttcattctttttattttattttattattatactttaagttttagggtacatgtgcacaacgtgcaggtttgttacatacgtatacatgtgccatgttggtgtgctgcacccattaactcatcatttacattaggtgtatctcctaatgctatccttcccccccccaccctccccaccccacgacaggcccaggtgtgtgatgttccctttcctgtgtccaagtgttctcattgttcaattccgacctatgagtgagaacgaaggcatttcattcttgatgatggtggtggtgatgatgttgatgacaattatattaataaagccattgctgtgaaaaaaaaaaaaaaaaaa

SEQ ID NO: 945 - protein, 153 aa, Human
MLHMGLAHVKRMPRSSRLQCKEAQAFFSLQSGTYRVLSTPLKLGVWEEKKHWAALLQPVSLGRKWKKRPCNLDDYVWGQLKYIPLKFSFTAAAADRQCVKAAEPGEPSMHAAATAMAGTRAGTTFDELQCQEDMVCTRFENKAYVNTNDFTRQ

SEQ ID NO: 946 - DNA, 1952 bp, Human
gcatttctgcattcgaagaagaatctgagagaaacctgacgcagggagcatgggtatctggacctcaggcactgatatcttcctaagtctttgggagatttacgtgtctccaagaagccccggatggatggactttatccagcatttgggagtttgctgtttggttgctcttatttcagtgggcctcctgtctgtggccgcctgctggtttctgccatcaatcatagcggccgctgcctcctggattatcacgtgtgttctgctgtgttgctccaagcatgcacgatgttttattcttcttgtctttctctcttgtggcctgcgtgaaggcaggaatgctttgattgcagctggcacagggatcgtcatcttgggacacgtagaaaatatttttcacaactttaaaggtctcctagatggtatgacttgcaacctaagggcaaagagcttttccatacattttccacttttgaaaaaatatattgaggcaattcagtggatttatggccttgccactccactaagtgtatttgatgaccttgtttcttggaaccagaccctggcagtctctcttttcagtcccagccatgtcctggaggcacagctaaatgacagcaaaggggaagtcctgagcgtcttgtaccagatggcaacaaccacagaggtgttgtcctccctgggtcagaagctacttgcctttgcagggctttcgctcgtcctgcttggcactggcctcttcatgaagcgatttttgggcccttgtggttggaagtatgaaaacatctacatcaccagacaatttgttcagtttgatgaaagggagagacatcaacagaggccctgtgtgctcccgctgaataaggaggaaaggaggaagtatgtcatcatcccgactttctggccgactcctaaagaaaggaaaaacctggggctgtttttcctccccatacttatccatctctgcatctgggtgctgtttgcagctgtagattatctgctgtatcggctcattttctcagtgagcaagcagtttcaaagcttgccagggtttgaggttcacttgaaactgcacggagagaaacaaggaactcaagatattatccatgattcttcctttaatatatctgtgtttgaacccaactgtatcccaaaaccaaaattccttctatctgagacctgggttcctctcagtgttattcttttgatattagtgatgctgggactgttgtcctctatccttatgcaacttaaaatcctggtgtcagcatctttctaccccagcgtggagaggaagcgcatccaatatctgcatgcaaagctgcttaaaaaaagatcaaagcagccgctgggagaagtcaaaagacggctgagtctctatcttacaaagattcatttctggcttccagtcctgaaaatgattaggaagaagcaaatggacatggcaagtgcagacaagtcatgagagaccccgactactcctcagccacatcgcaccaacaattctcttcaggtctaggatggcagtcactattcatgccggataatagagaactatgtgacgcagtcctctcaggagtctgagtttacagagccaacttgcagcacctggttatgcctcctttcatctcaaagccaaagagctgccaggtaaatggttatgtggtctatgttccaaacaaaccacatgatcttgcctgtgtcacaatgtaacaagactctagctgggtcccctggtgatgagtttcagcatagaataatgttcaaggaaaagaaaacgaaaacagtttaaatctctaccacagcctcacaagcaaatgctaaggggaacatacatgtaaaaagccagcaaactatcttcaaactcttccgtccttaatgtcttccatggctattgcccccacaatggtctcttttctccctgctcccttattaaagaactctttctgaaaccc

SEQ ID NO: 947 - DNA, 479 bp, Human
  unsure 30: unknown base
  unsure 36: unknown base
  unsure 38: unknown base
  unsure 40: unknown base
  unsure 41: unknown base
  unsure 42: unknown base
  unsure 43: unknown base
  unsure 44: unknown base
  unsure 45: unknown base
  unsure 46: unknown base
  unsure 48: unknown base
  unsure 49: unknown base
  unsure 50: unknown base
  unsure 51: unknown base
  unsure 53: unknown base
tctactcctcaggcctcaaatgtgagcgcnccaaanantnnnnnnntnnnncnggcgggcaaggcccccgatcacgtgataccgccccccaactccgggcggaagaggccagcgacagcgctgcacgaagcgagtgggcgggcgctcgtgcccggctaaaagatggctgctggcgcctggcagccaccgcctgggaggttactgtaaggcccgcagctcccgccagctcccgcggactgctgccgcctccttaccatgaagccagtaagtcgtcgcacgctggactggatttattcagtgttgctgcttgccatcgttttaatctcctggggctgcatcatctatgcttcgatggtgtctgcaagacgacagctaaggaagaaatacccagacaaaatctttgggacgaatgaaaatttgtaactcttctggatttaattatctgaaaatacagttctttccctcatgcttatgtagat

SEQ ID NO: 948 - DNA, 1757 bp, Human
agcaaaatctacattgcaacagacagttcccctgtggatatgcaatcttatgaactttgctgtgacatgatcgatgttgtaattgatgtgtcttgtatatatgggttaaaggaagatggaagtggaagtgcttatgacaaagaatctatggcaattatcaagctgaataatacaactgtcctttatttaaaggaggtgactaaatttttggcactggtctgcattctaagggaagaaagctttgaaagaaaaggtttaatagactacaacttccactgtttccgaaaagctattcatgaggtttttgaggtgggtgtgacttctcacaggagctgtggtcaccagactagtgcctccagtctgaaagcgctgacacacaatggcacgccacgaaacgccatctagtctgaatcccagcgtcggggctctgtgccagcttactcttcactccagggtcggatgccacgtgctacaggacatgggagctgctgcttgtgggaatctggtgcctgttccactagagacaaggggtagagtttctcatttggatgaaaaccccttcaactggtggtgtacaactgaagctactatatcttttttgaaaatggcaaaaaaaaaaaaaaaaaaattctggagaccacagaactcaggtgtgtgtttctcctcttttgggtcccctttaagtagttgggatattttggacctggagataacaccagttacccatccttaccagggaatgttgccatcaattccagttgaaaataatagaaaagactgaatttttatatgcttcacttaggctttcatttgagtagactctaaaaattctgccttgcttaagttctaacactgcctctcagatttcagttttggacattgcacaactaagaccttttaaacgcatttgcttgctaactcggaagacacatagtctgcagcaagacattcctatattgaagaaatgagagaaaattttatgctgcatcaggtggagagcaaggctcaacggtggttgcattagttccctcggaagtattgaaaaaactttgaaatggaagaaaatttttgcacctatgttctgagtaccagatgtctgggttctttcttctgcattagataaatgatcatgctcagtgtaacaaagggaattaaaagttttcccacagtccccttctaggggagaaactcattgtgtcactgaaatgtttagcttactttaatcttgatatcagcctctacagaccttttattctaagctatcgagcttcttgattgcatttggttgaccacgagtgaccctaaggcattgggggactgtccactgggagttggagtgagcacgtggtgctgcaacaggcattgttttacatactttgtctccagtattctgacaccaagtgtcaactgtggtactttctttgcctaggatatgaattcataattgttgcttttgttgatggttgataccctttccattgatttaaacctaacacattatttctattccacatgcccagtagacatatattccaaagccactggaccacttgagtacataagtgccactgtttaatgcaatatgtatattcaggtctgtaaagctaacagtgtgacttggagtgcttcctgcagatgattctgacttgagtatttacatggaccatggtgatatccaaaagaaaaatgctttttatatttatagattatttcattgaactatatatgaaatgggtatcaataaatgtatttactcc

SEQ ID NO: 949 - DNA, 4206 bp, Human
tcagtcttatacttccacttaagtcttctcgccggatgctttttcctccttgcttttgccggaaaggagagagatacatgtgaaggatatctgtcctcgttgcttcccctgccctctcaaaagtttaacttctgtgggaatgtgtatcttccttttctggaccatttgacagtcccgccccagccgccgtgtgatttagcaaccggtatcatattcagatcaaatcttaaaaaaaaaaagtcacctacagaactacagaattgttctctcccgctcaagaagggcaagtggactttggcgttaagatgcaggggggtgaaccagtgtccacaatgaaagtctcggagagcgaaggaaagctggagggccaggccacagcggtgaccccgaacaagaacagcagctgtggaggtggaatcagtagcagcagcagcagccgcggtggcagtgcaaaaggctggcagtacagtgatcacatggaaaatgtgtatggctatttaatgaagtataccaaccttgtcactgggtggcagtacaggttttttgttttaaacaatgaagctgggctgttggagtactttgtgaatgaacagtctagaaatcagaaacctagaggaactttgcagcttgcaggagctgtaatatcacccagtgatgaggattctcacaccttcactgtaaacgctgccagtggggaacaatataaactcagagctacagatgcaaaagagcgacagcactgggttagcagacttcagatatgtacacagcatcatactgaagctattggaaagaataatcctcctctgaagtcacggagcttctcacttgcatctagtagtaattctcctatatcgcagaggagaccaagtcaaaatgccatttctttttttaatgttggacattccaaactgcaatcactgagcaaaagaactaatttacctccagaccatcttgtggaagtcagagaaatgatgtctcatgctgaaggacaacaaagagacttaattagacgaattgaatgccttcctacttctggccatcttagttccttggaccaggatctcttaatgctcaaagctacttccatggcaactatgaactgcttaaatgactgctttcatattctccagttacagcatgcatcacatcagaagggctcattgccttcaggaacgacaatcgagtggttagaaccaaagatatctttatcaaaccactataaaaatggagctgaccagccctttgcaactgatcagagtaagccggtggcagtcccagaagagcagcctgttgcagaatctggactattagcgagggagcctgaagaaataaatgcagatgatgagatagaggatacatgtgaccacaaagaggatgacctgggagctgtagaagaacaacgtagtgtcatcctacatctcttgtcacagcttaagctgggcatggatttaacaagagtggtgcttcctacatttatcctagagaagcgttccttgctggaaatgtatgcagactttatgtctcatccagacctatttatagccatcactaatggagccacagctgaggacagaatgattcgctttgttgagtactaccttacctcatttcatgaaggccgtaagggagccattgctaaaaaaccatacaatcctatcattggagaaacatttcactgttcctggaagatgccaaaaagcgaggtagcatccagtgtttttagcagttcttccacccagggagtcacaaatcatgctcctttatcgggggagtctttgacccaggtgggatcagactgttacacagtcagatttgttgctgagcaggtttctcatcatcctccagtctcaggattttatgcagaatgtacagagaggaagatgtgtgtaaatgcgcatgtctggactaagagcaagttcttaggcatgtcaataggcgtgacaatggttggagaaggtatccttagtctgttggagcatggagaagagtacacattttctctaccctgtgcatatgctcggtcaattttgactgttccttgggtagaactgggtggcaaagtcagtgtcaactgtgcaaaaactggatattcagccagcatcacttttcataccaagccattttatggtggcaaactgcatcgggttacagctgaagtaaagcacaacatcaccaacactgtggtatgcagagtgcaaggggaatggaatagtgttcttgagttcacatatagcaatggagagacaaagtatgtggacttgactaaattggcagtgacgaagaaaagagtgagacctctggagaagcaggatccatttgaatccaggcgattgtggaaaaatgtgacagactcgctgagagaatctgaaattgataaggccacagagcataagcataccctggaagaacgtcagaggactgaagaaaggcatcgtactgaaacaggcacaccttggaaaaccaaatattttattaaagagggagatggctgggtttatcataaaccactttggaaaataattccaacaacacaaccagcagagtgacacatactatctaaaactcgaccaaatgaggttcttctctgtttaccctaaatcctcccagaatggagtcattgcactgagtgacctgcttcctgattgcgcagactgaaactagctaaacctgaatgtacctactagggcaccataatactgcagcaagaccaaagtggtaaagaaacacagtggaccttttaccaacctgttcatgtgatgtgagcaataccatcttaaaacttgttacctgaatcagtagatgaatcttttatccagttcttgctcctaaagttaagtttgaatcccctatttttgcacaggggcagcagatacacacaacaatgagaactcagtgactttgatttctttgtagtgaaaagtgaagtctccgtttcagagtttgtgtctttctttctgtccataactgaagtattcactactcttgtaaaccaaccaagaggaggagaaagatgacccagaagtggattcagccattgtgcctgaaatcagtgtttaaaaaaaaaaatcaaccaggttgtggtaacaaggcattctatttcttcaaaaagactgtatgcctgtgtctgaggaacttacctattatccacctctgttggaactctcttttaaaaagtacatttatagattgatcagaattataaccatggagaattttttcttctgagcattttaatatacttgaaaacaacattgacttgaaaaatttcagaacatttttcagtacctagttttattaaatattacacttgagagacactttttaaaaatgtgttaatgtcaatatgatgagattttagcctttctccagaactaaggcattaaagaaaatagcaaatattaaaaaataaaactgttacttttttccttctttcttttcacctttaggttaatatccagtattatgtgttatccctttggataagtatgctttattttacctctgttaaaaattaaaataaatgattctattcatatttgtcagtaattcaaaacttatatgtgtaactgaacgcgcatgtaaggtatggttttatttattttttttttttttgaggaaatttaaatgctaaagaaacaacgaaatgaaaaggtatcaggaaaaaaagatcaggaagttgtattcaggtacaaatctttttttaaataagtattttgttgaggttgaagaattgctggcaattaaaagaatagagctaattatggctttcatcattcattcatgtatttattgagcacctacttattatggtgctcaacacttgttactgcaagctaccttaatttcccaagagtggtgccttactctgttttttctgatatggtcttccaatcagtgtgtgtaacatacctgttgtttatcagccattgtaggtggctgtgtctgttgcatcatcataagaagtttaagctttgtgctctgataaattgtgttctgttaaagaggttagtaggatgaaaacagcaaaacaataattttttcaacaaattgtaaattataagaaaaagagttggtttgtgtacaacaattttaatgattcccttgttcatttttgctgtgaaatgcactgaaaaaaatcctcaaaatgagttatagttcctgtgttgggaaaattgacaaataataaaactagagaacaaacaa

SEQ ID NO: 950 - protein, 747 aa, Human
MQGGEPVSTMKVSESEGKLEGQATAVTPNKNSSCGGGISSSSSSRGGSAKGWQYSDHMENVYGYLMKYTNLVTGWQYRFFVLNNEAGLLEYFVNEQSRNQKPRGTLQLAGAVISPSDEDSHTFTVNAASGEQYKLRATDAKERQHWVSRLQICTQHHTEAIGKNNPPLKSRSFSLASSSNSPISQRRPSQNAISFFNVGHSKLQSLSKRTNLPPDHLVEVREMMSHAEGQQRDLIRRIECLPTSGHLSSLDQDLLMLKATSMATMNCLNDCFHILQLQHASHQKGSLPSGTTIEWLEPKISLSNHYKNGADQPFATDQSKPVAVPEEQPVAESGLLAREPEEINADDEIEDTCDHKEDDLGAVEEQRSVILHLLSQLKLGMDLTRVVLPTFILEKRSLLEMYADFMSHPDLFIAITNGATAEDRMIRFVEYYLTSFHEGRKGAIAKKPYNPIIGETFHCSWKMPKSEVASSVFSSSSTQGVTNHAPLSGESLTQVGSDCYTVRFVAEQVSHHPPVSGFYAECTERKMCVNAHVWTKSKFLGMSIGVTMVGEGILSLLEHGEEYTFSLPCAYARSILTVPWVELGGKVSVNCAKTGYSASITFHTKPFYGGKLHRVTAEVKHNITNTVVCRVQGEWNSVLEFTYSNGETKYVDLTKLAVTKKRVRPLEKQDPFESRRLWKNVTDSLRESEIDKATEHKHTLEERQRTEERHRTETGTPWKTKYFIKEGDGWVYHKPLWKIIPTTQPAE

SEQ ID NO: 951 - DNA, 2336 bp, Human
cttttcttccgcacggttggaggaggtcggctggttatcgggagttggagggctgaggtcgggagggtggtgtgtacagagctctaggactcacgcaccaggccagtcgcggattttgggccgaggcctgggttacaagcagcaagtgcgcggttggggccactgcgaggccgttttagaaaactgtttaaaacaaagagcaattgatggataaatcaggaatagattctcttgaccatgtgacatctgatgctgtggaacttgcaaatcgaagtgataactcttctgatagcagcttatttaaaactcagtgtatcccttactcacctaaaggggagaaaagaaaccccattcgaaaatttgttcgtacacctgaaagtgttcacgcaagtgattcatcaagtgactcatcttttgaaccaataccattgactataaaagctatttttgaaagattcaagaacaggaaaaagagatataaaaaaaagaaaaagaggaggtaccagccaacaggaagaccacggggaagaccagaaggaaggagaaatcctatatactcactaatagataagaagaaacaatttagaagcagaggatctggcttcccatttttagaatcagagaatgaaaaaaacgcaccttggagaaaaattttaacgtttgagcaagctgttgcaagaggattttttaactatattgaaaagctgaagtatgaacaccacctgaaagaatcattgaagcaaatgaatgttggtgaagatttagaaaatgaagattttgacagtcgtagatacaaatttttggatgatgatggatccatttctcctattgaggagtcaacagcagaggatgaggatgcaacacatcttgaagataacgaatgtgatatcaaattggcaggggatagtttcatagtaagttctgaattccctgtaagactgagtgtatacttagaagaagaggatattactgaagaagctgctttgtctaaaaagagagctacaaaagccaaaaatactggacagagaggcctgaaaatgtgacaggatcatgaatgtcaaaggcttttatcttgagaacatggtgtctggagttaaaggtattggcatactccacacatctgtaccattcttgagtgatcgcttaggaatgaatgtgatttgaactcattcatgttgagagggtgtcaaattgagaaccaggtagatccccaccacctacagtaaaaaggaccctaaagtaaattggttgaagaaattagatcccaaagattcttggtgaattttgaagtcttcatcagtatatccatattaaaacgagatgacagaagccaaagtaattatggcaagtaatggtttttatcttaactataagttatttgctcaagggtgtaatggtcattaccaaggcttttagaatgcagtttctcatttgctgtggacatgaccataaaaaaaaatttcccagtaggttttctatctgctacgttgctagcaatcagcttattgggaacagttgattaactgtaatagaaatgcaatacaaataaaatgtgaaccacatgtgatttttctttaaaatcagtgagatttgaaaattctcctagatctcttgaatcatgcaaatttgctttgcctttatattgtaacccttgtgggttgctaataaccaagcagtttgtagtagagttaactcaggctcgttctagggactcattcatgttcactcactgtacactcatctctggaaatgtaaaatttacttttatactattgttatgtagggctgacaggacaactggatcagtttcattaaaaaggtatgtatgcattagaaaagacatttgtatgggtcatttcaaagagggcttatgaggctgtgaaacccagagctcttaacgctgtgaccaaagatggaagttctctataggaagccatagcactcctaatgtttggtgctatgttttcctgaggagatataaaacgtaataatccatgattgttgccatgtgagagttttaaaggttaatcaaaatttctcttcttcagggcaaacttgaagataaatcttttgactccagctctttagaggatctaaagtgaccttgatggacagtggaagaaatcacaacatggaattcctcgaataacaatttattgactttaaataattttgtctaatgctacatatacacaattaaaaaacctttacactatttctagaaagtcagcatgtatttttggctcgaagtttctctagtgttttctgtggaaggaataaaaatttgagtttcaaaaaaaaaaaaaaaaaaaaaaaaaaaaaaaaaaaaaaaaaaa

SEQ ID NO: 952 - protein, 278 aa, Human
MDKSGIDSLDHVTSDAVELANRSDNSSDSSLFKTQCIPYSPKGEKRNPIRKFVRTPESVHASDSSSDSSFEPIPLTIKAIFERFKNRKKRYKKKKKRRYQPTGRPRGRPEGRRNPIYSLIDKKKQFRSRGSGFPFLESENEKNAPWRKILTFEQAVARGFFNYIEKLKYEHHLKESLKQMNVGEDLENEDFDSRRYKFLDDDGSISPIEESTAEDEDATHLEDNECDIKLAGDSFIVSSEFPVRLSVYLEEEDITEEAALSKKRATKAKNTGQRGLKM

SEQ ID NO: 953 - DNA, 993 bp, Human
gggagtacctggaccagcttaatgccctgcgccgcgagaagcagaagctcgtggagaagatcatggaccaataccgcgtgctggagcctgtgcccctgccccggaccaaggtccccttccccggcacccatgcgccgggcccagagctccctctgcctgcgggatgagaccttggcaggcgggcagcggcggaaactcagctcaaggttcccggtggggcgaagctctgagtcattcagccctggggacacccctaggcaacgattccgacagcgccatccaggccccctgggggcgcccgtctcccacagcaaaggacctggtgtgggatgggagaactccgctgagaccctgcaggaacacgaaacagatgccaaccgagagggccctgaggtacaggaaccggagaaacgtcccctcaccccatccctcagccagtgacaccgtgggaacagcaggcttgggagtgcagccttctcggcactggagtgtcagcggaggccccaggcagcccaagagctcagggagccagggaccccaaggggagtccttggacaaggaggcctgggccctgagatcctccacggtcagcgccggggcccggagatggagctgggacgagtgtgtggacaggggggatggctggccccccgagcagctccaggctggagttctggttcttccaggtggctcccgctgaggcagcggtctctgggggatcccccagctgaaggaggctggcaggagttggcaagagaaccccctgccctgtccaggtgggaagctgagtcccagtgctgggggactgtggcctgggctgatcttgagccttaactggacatgaggggcatgagaataaagctgaactgcagcctcctgaaaaaaaaaaaaaaaaaaaaaaaaaaaaaaaaaaaaaaaaaaaaaaaaaaaaaaaaaaaaaaaaaaaaaaaaaaaaaaaaaaaaaaaaaaaaaaaaaaaaaaaaaaaaaaaaaa

SEQ ID NO: 954 - protein, 139 aa, Human
MPCAARSRSSWRRSWTNTACWSLCPCPGPRSPSPAPMRRAQSSLCLRDETLAGGQRRKLSSRFPVGRSSESFSPGDTPRQRFRQRHPGPLGAPVSHSKGPGVGWENSAETLQEHETDANREGPEVQEPEKRPLTPSLSQ

SEQ ID NO: 955 - DNA, 3863 bp, Human
ggcggcggcggcggcggcggcggctcgggtggctgcgctgggaggcggcggtgagaggctcgcacgcctccagcccggccccggccccccgggagggagagccgagcagccccggctctgggctacggactatgggcgaatagctctgaccacccggcgaagtgcacacacccagaagctatgtccttcggcagtaaaagttttacagcacaatatatgtgctctgctctcctcccgcaatcctgctccaagagatcttaagctggaggcaccaggtctgaattccagactcctccccaccacccacacttcacctccaactggagcatgaccacagacccattcagggaggctggcggactcttcatcctggacagtcccttactgtatgtcaagtagagctgagaatgaagcggagagcatcagacagaggagctggggaaacgtcggccagggccaaggctctaggaagtgggatttctggaaataatgcaaagagagctggaccattcatccttggtccccgtctgggcaactcaccggtgccaagcatagtgcagtgtttggcgaggaaagatggcacggatgacttctatcagctgaagatcctgaccctggaggagaggggggaccaaggcatagagagccaggaagagcggcagggcaagatgctgctgcacaccgagtactcactgctgtctctcctgcacacgcaggatggcgtggtgcaccaccacggcctcttccaggaccgcacctgtgaaatcgttgaggacacagaatccagccggatggttaagaagatgaagaagcgcatctgcctcgtcctggactgcctctgtgctcatgacttcagcgataagaccgctgacctcatcaacctgcagcactacgtcatcaaggagaagaggctcagcgagagggagactgtggtaatcttctacgacgtggtccgcgtggtggaggccctgcaccagaaaaatatcgtgcacagagacctgaagctggggaacatggtgctcaacaagaggacacatcggataaccatcaccaacttctgcctcgggaagcatctggtgagcgagggggacctgctgaaggaccagagagggagccctgcctacatcagtcccgacgtgctcagcggccggccgtaccgtggcaagcccagtgacatgtgggccctgggcgtggtgctcttcaccatgctgtatggccagttccccttctacgacagcatcccgcaggagctcttccgcaagatcaaggctgccgagtataccattcctgaggatggacgggtttctgagaacaccgtgtgtctcatccggaagctgctggtccttgacccccagcagcgcctggccgccgccgacgtcctggaggccctcagtgccatcattgcatcatggcagtccctgtcatctctgagtgggcctttgcaagtggttcctgacattgatgaccaaatgagcaatgcggatagctcccaggaggcgaaggtgacggaggagtgctcccagtacgagtttgagaactacatgcgtcagcagctgctgctggccgaggagaagagctccatccatgacgcccggagctgggtacccaagcggcagttcggcagcgcaccaccggtgcgacggctgggccacgacgcacagcccatgacctccttggacacggccatcctggcgcagcgctacctgcggaaataacagcctcagccggggccaccagcactgctgccacttcttccagccccagccaaaggcgtggctgtcagggctgggccctgtagtgctggactctcccgggccacaatagggacagggcagggacagggacagcccaggtcacacgtggggtcagcagaggtaccacgaagctaccttttgggatgattgctcgattgtttggtttttaaatctgagaagcctagataactaatctgcttttaatcacgatgttttaatctacctctgtctctttaaccatgctgtctctggactgagcaagagggaggagggagcctgctcaccccactccagggccttccccagcggccaccaactgacctggggcgctgctccccacagtccaaataagctgaaagtgcagctcgctgcaggccccagagcgagcttcccctcctccctgctctcccaggcccctgccacagcctctttccgtccctctctttctgatccaggcccctcagtccaagctttggaaaaccttcacctcatcttaaaccgaactcaaatatatttatttttttaccataccaacttctctcccatctctaggtggctcagtccatggccactccctgcccccagcctggctggacagcaaggaatccacagcccacacgtgagctccctcctcacccccaggcagggaagcccctcctgccagtccctgtcccctttcagcccaccagtccctctctgctgccggtgatgggaggcctttctagacctggctctttctctcccgtctcagtggcttctctgaggtgctgtacacgcgcgttaacctgttcccttctctatccttccccgtggtactgagctcacgtggactcccagtgcgaaggggcccatgggttgggctgcaggcctggccgtgagcgggggctgcctgcacgctcccctagcctactcttgtgtttaggggatggtgggaacatatcccagtgcccttgcctcataatagatgtggtgactctcccggtagaccctagcaagggtcctccatggtggtgagggactcaggagaattgtagggattgggggaccctgcctgcctggcttgagaacagccctgctgcccttttgagccgagattttgaagtggatgcccgtcttgccagaaatgctgttctcaccagaatgccccctccccttgcccttactggacttggccctgcctgatgccaagcaaagacccttccccagaggcctaccccccatatgtcctcagagaggctgagtgtcccctccaggcagtcatgggccctgaggcccctcctgcctggccctgctccccagtggggaggtgactgtgtttcccagagtgtgagccgctctcctccccctaaaaagctgactcactgtgagtgaccttgggcaagttcccaaacctccttgtgcctcagtttccccatctggaaaaaatggggccacctcttgccagcagtagcagggctgcccacgcccctttctccccatgccccatccagcacttgggcgactcatgcctctgcctcagtgggcctgtgggagcctactggagcccagcacttactccccctgagcagcgagcctgcgtctgtctcagctgtccagcgctgagggccagggtcttgtgctgtggggctgggggatgccctcttttctatatttatttcatagaaagtctcctgcgggagcggaaatgcagtccggcctagggctcccagcccttgactgtcctcctgtgagggcctgaagctgggccagggcccgtcgcagcggagccccctctcagcagcccaccgggtccctccaggctgctgcccgtgcgtggtctttctcctccttttcaaagcaatagccgccgggtctgcaaagccctgtcagacagactgggcccttccaaggtcaagccatgtgtctgatgacattcctggtgaagcaaaggagaggaggatgggtcagccctcactgggtgtcacacactgagagaagtcctattgtaaagaaacggaaaaagtcacaaaaaagtttgtataaagacatatttttgtactacatggggactcttcctgcatgtcagcaataaaacttcctgatctggaaccacaaaaaaaaaaaaaaaaa

SEQ ID NO: 956 - DNA, 4817 bp, Human
gtttgaggccggccagtcgtgactgggcggcaatgaggtcagtgactgccgggagtcctgcaggggcggggcggcgccaagcgcagggagcccggctgagtggcagcccagattgaagatggatacgtgacaatcccagggaccgctgcactgacttcatttccttagacaagacacagtgtagggcccggcccgtgttggccccaggactcctttggaatatagctgtggacaatgaatcctgcgagcgatgggggcacatcagagagcatttttgacctggactatgcatcctgggggatccgctccacgctgatggtcgctggctttgtcttctacttgggcgtctttgtggtctgccaccagctgtcctcttccctgaatgccacttaccgttctttggtggccagagagaaggtcttctgggacctggcggccacgcgtgcagtctttggtgttcagagcacagccgcaggcctgtgggctctgctgggggaccctgtgctgcatgccgacaaggcgcgtggccagcagaactggtgctggtttcacatcacgacagcaacgggattcttttgctttgaaaatgttgcagtccacctgtccaacttgatcttccggacatttgacttgtttctggttatccaccatctctttgcctttcttgggtttcttggctgcttggtcaatctccaagctggccactatctagctatgaccacgttgctcctggagatgagcacgccctttacctgcgtttcctggatgctcttaaaggcgggctggtccgagtctctgttttggaagctcaaccagtggctgatgattcacatgtttcactgccgcatggttctaacctaccacatgtggtgggtgtgtttctggcactgggacggcctggtcagcagcctgtatctgcctcatttgacactgttccttgtcggactggctctgcttacgctaatcattaatccatattggacccataagaagactcagcagcttctcaatccggtggactggaacttcgcacagccagaagccaagagcaggccagaaggcaacgggcagctgctgcggaagaagaggccatagctgctccagccggggctccggggcggcagcagagctggcacaccgattctgggaagccccgcgaatgatggcttttgaattaatgaggcagtgaatgttttgtgtttacttctaagggaaatactaactttctttcgcattagtattaattttgaagtagctacaaagtatttttaagaaattataattttatgactgtctggcaggctctgtcagtttagccgcgccggaccgtgtcaagcatctaggagaggagtccatggtgtccaggcatcggggcgtcacacctgttgaggagtggggtggctttgaatgctggaaatggcttcatagtgaagtgcctcccacagggcgggtgggtcagcgttgactctttccagctgcacactcatatgccgtgtgtcttattcagaagtcacattcttttcagttggagagaattgggctaagatagaaaataacatgatttgttccttattaaagcttcccagcgtatgaaattctaagctgggtggggtggctcacacccgacgtaatcccagcacgttgggaggccgaggcaggtggatcacttgaggccaggagttcgagaccagcctggtcaagatggtgaaaccccatctctactaaaattacaaaaattagccgggtgtcgtggcacacacctgtaatcccagctatttgggaggccaaggcaggagaattgcctgaacccgggaggcggaggttgcagtgagctgagatcgcaccactgcactccagcactccagcctgggtgacagagcaagactctctctcaaaaaaaaaaaaaaaaaaaaattctagaccgaagtgtacggcagtgccatctggtggcaagtggtacaaagacaacgctgaggggtagtgactcctgtagcagcagagacgccttggagtttaacccccaccaaccagagcgtgggctggtaaagatgaaatcttgcaagttttttttttttttaaatcatggtacctgttttaaaatgagaagttattattcatactgtgttgctcatttgacaaaataaggtaaggatttcataatcaggttgtctgggtttcagagctgtttttaattgactgagttacctacaggcacccaatctagaccctaattctgtggttggtgttcctctgtagatttcaagacaagtagtgatgtcattttctccctgagctgtagggtggacctggacccctcagagatgctcgactgcagggtcctggggtccctagagtggtcctgcagcagcccctggcaatgagctgcctgatgatgagtcccaaggtacattgttctactgttttatacccaggtagaagttacacagcaatttagcaatgttgttaacagacatacagaattgtgtgtgtgtgtgtgtgtgtgtgtgtgagtgttttgatataaacgtgcaattaaaattcaaagtttattttttatcacaagcacctttgaaatgtacgtggaaaacgtcggctgctcgtgagaatcatgtgtgacttacgttccttatgttttatggaactctcggaacagtgttttgtttttgtttagtttttgttttcgtttttttgagacggagcctggctttggctcccaggctggagtccagtggtgtgatctcggctcactgcaacctccacctcccgggttccagggattctcctgcctcaccctttcaagtagctgggattacaggtacctctaccatgcctggctgattttttgtatttttagtagagacagggtttcaccatgttggccaggctggtctctgactcctgactaaaagtgatctgcccacctcggcctcccaaagttctgggattacgggcgtgagccacttcacccggcccggagcggtgtattttgattgctggtgctttaactatattgaccaaggtgtatagtaacctatttatcacattttacgaagcaattttaatcttaaacacatccagcaaatggtgtccctgctgaaacttttaactggaaacctcacacctggcaggcagcactctctgcagccgtgcccttgtggagtcagcaggagctggtgtttttcagccagacagaggcataataaagtgactgatgtttacagaacccaaatgatgtcttcctctctctcaaaataaactaacctattcatattgctgtgaatgctttatcttggagatagaaaatataatgataaattcatcatgtgttcagaattcgatttggagttggaagtggacagcctaatttttatctcacctccactaggactttgaccttcccaggggtccacactttacctcctgtatcttcatacgcgtgtgtggatgcatagagatggaggtgctgtagagaagcacaggctcacccgctccgtccagtgtcacccacacattggtccggggacccctcagtgcagagcctgaagttgggggtttaggggtggaaaaggcttcgtgaaatgttaatgatgcgtacaccttccagatggcacagcactttcccatggtcctcactggcctcagtctccctgaccggcagtgtgaggggatgtagctatagtggagcatggtacaagcgacattcatgagctctgacttcttggtgccaggttggtgtgagcctgggcccggcccactcagcggcccacattggccagcattcagctgcacgtgtgtgctgcgtgcttcacatcctctattgagagttacagcaagtgttaaacgaggtgagttcacataacaggaattctggaactgcttgaaaactaggacgattgggcaatatcggccttaactccacctgatggcaggtgacccggatagaaaatggccctgcgtttagccaggatgtggctctccagcttggcttcagtgtgatcacttgtcagtgcgctttctctttcgatagtgaaatccttctctatacctatgttttgttttgtttcttaagttgggaaacagaatgggccagggaggttgagtgactgaagaccaagggttggtgcagcctcctcgccgcgctgcgggggctgggccgcacaggcttctgcccttctcggtgtccaggctccttgggtgatgctggagttgtcatggccgcagttcagtgtgagattttttaccaggtattgcgcttaagggacatgattttccattttcttcgcccggacaacttgaatgaaatgggcactgttgattccacttctgtcgaggagcttcggggctcagagaggtgatgacgtgcccaaggtgacgcaactcgtgaacagccgtgcctgccttgggcgcagcctccggcgccagagctgggctcttcaacacggcatttagcgcagaaagtcgtggttcaggcagtatgggccgctgtgacaaaacacctaagactgggtagtttataaagaacagacattcaggccaggcacggtgactcacgcctgtaatcccagcactttgggaggccgaggcgggtggatcatttgaggtcaggagtttgaaaccagcctggccaacatggtgaaaccccatctctactaaaaaaacaaaactagctgggggtggtggtgcatgcctgtggtcccagctacttgggaggctaaggtagaagaattgcttgaacctgggaggcagagattgcagtgagccgagatcacgccattgcactccagcctgggtgacacagtgagactccatctcaaaaa

SEQ ID NO: 957 - DNA, 2721 bp, Human
gttcccgccaggtccgtgccgggcgagagagatgctgcccggcccgcctcggctttgaggcgagagaagtgtcccagacccatttcgccttgctgacggcgtcgagccctggccagacatgtccacagggttctccttcgggtccgggactctgggctccaccaccgtggccgccggcgggaccagcacaggcggcgttttctccttcggaacgggagcgtctagcaacccttctgtggggctcaattttggaaatcttggaagtacttcaactccagcaactacatctgctccttcaagtggttttggaaccgggctctttggatctaaacctgccactgggttcactctaggaggaacaaatacaggaatagcaacaactataactacaggattaactctgggaacgccagccactacatctgcagctacaacaggcttcagtttaggattcaataaacctgcagcatctgccacaccatttgctctacctattacctctacctcagctagcggtctgactctttcgtctgctctgacatcaactccagcagcatccacaggatttactctaaataatttgggtgggacaacagccacaactacaactgcatcaacaggcctctctttagggggagccttagctggtttgggaggttcacttttccagagtacaaacacaggaacatcaggacttggacagaatgctttagggttgactttgggaactacagcagctacttcaactgcaggcaatgaaggccttggtggtatagatttcagtagctcctcagataaaaagagtgataaaacgggaacaagaccagaggatagtaaagctctgaaggatgaaaatctacctcctgtcatctgccaggatgttgaaaatctccagaaatttgtgaaggagcagaaacaagttcaagaagaaattagtagaatgtcttcaaaagcaatgcttaaggtacaagaagatattaaagctctgaagcagctcctgtcgttggctgccaatggaatacagagaaacactctcaacattgacaaattgaaaatagaaactgctcaggagttgaagaatgctgaaatagctttaagaacccagaagacaccacctggacttcaacatgaatatgcagctcctgctgactacttcagaatcttggttcagcaatttgaggtacagcttcagcagtacaggcagcagattgaagaactagaaaaccatcttgccactcaagcaaataattcacatataacccctcaagatttgtcaatggctatgcagaaaatttatcaaacatttgtagctttagcggcacaacttcagtctattcatgaaaatgtaaaggttctgaaagaacagtaccttggctacaggaaaatgttcttgggagatgctgttgatgtgtttgaaacaaggcgagcagaagccaagaagtggcagaacacacccagagttactactggacccactcctttcagcaccatgccaaacgcagcagccgttgccatggctgcaacacttacacagcagcaacagcctgctacagggccacagccatctctgggagttagttttggaacgccattcggctcaggtattggcactggcttgcaatcaagtggcttaggttcttcaaaccttggaggatttggaactagctctggttttggatgcagcaccacaggggcctccacatttggatttggaacaacaaataaaccctcaggaagtcttagtgcaggctttggcagctcaagtacatctgggtttaacttcagcaatcctggcatcacggcatcagctggtttgacttttggggtgtccaatcctgcctctgcaggttttggaacaggaggacaactccttcagttgaagaaacctccagctggaaacaaaagaggaaaaagataaacatgggttgatgtgttgagagaatccatagcagcaccgttcattctatgagtctatttttctaatgatgcagtaattaaattgcatcccaggagatttataaagttttgatatttttccctactctggaatttgaactttcttcatgtttgccatactgaacatcttttttcttgtggaatttaaagtccagctgtgttttctttttaatttgattctcagtgtaagaaatgttctgattacatcactgattggtaatggttagaaaccattaacctaaaacttactatttaacctagtgtttttgttgatgaggtttacattatgtgaatacatgcacatttgtttcttatacaggtggtgtgaactctagggcctatactagaatcaatttgttccttgttaaaggccttttgaattatactgcagggcatcttgtgaatatgtatgtaaatatatacagaataatacacacagttgtgtgtgcatataaaatacatatttacgccaggcgtggtggctcacgcctgtaatcccagcactttgggaggccgaggcaggcggatcacctgaggtcaggagtttgagaccagcctgacatggtgaaaccccatctctacgaaaaatacaaaaattagctgggcatagtggcgggtacctataatcccagctactcgggaggctgaggcacgagaatcacttgaagccgggaggtgggggttgcagtgagccgagatcacaccactgcactccagcctgggcaacaagagcaaaactccgtctcaaaaaaaaaaaaaaaaaaa

SEQ ID NO: 958 - DNA, 1627 bp, Human
cagtagcccgctgcccggcccccgcgatcctgtgttcctcggaagccgtttgctgctgcagagttgcacgaactagtcatggtgctgtgggagtccccgcggcagtgcagcagctggacactttgcgagggcttttgctggctgctgctgctgcccgtcatgctactcatcgtagcccgcccggtgaagctcgctgctttccctacctccttaagtgactgccaaacgcccaccggctggaattgctctggttatgatgacagagaaaatgatctcttcctctgtgacaccaacacctgtaaatttgatggggaatgtttaagaattggagacactgtgacttgcgtctgtcagttcaagtgcaacaatgactatgtgcctgtgtgtggctccaatggggagagctaccagaatgagtgttacctgcgacaggctgcatgcaaacagcagagtgagatacttgtggtgtcagaaggatcatgtgccacagatgcaggatcaggatctggagatggagtccatgaaggctctggagaaactagtcaaaaggagacatccacctgtgatatttgccagtttggtgcagaatgtgacgaagatgccgaggatgtctggtgtgtgtgtaatattgactgttctcaaaccaacttcaatcccctctgcgcttctgatgggaaatcttatgataatgcatgccaaatcaaagaagcatcgtgtcagaaacaggagaaaattgaagtcatgtctttgggtcgatgtcaagataacacaactacaactactaagtctgaagatgggcattatgcaagaacagattatgcagagaatgctaacaaattagaagaaagtgccagagaacaccacataccttgtccggaacattacaatggcttctgcatgcatgggaagtgtgagcattctatcaatatgcaggagccatcttgcaggtgtgatgctggttatactggacaacactgtgaaaaaaaggactacagtgttctatacgttgttcccggtcctgtacgatttcagtatgtcttaatcgcagctgtgattggaacaattcagattgctgtcatctgtgtggtggtcctctgcatcacaaggaaatgccccagaagcaacagaattcacagacagaagcaaaatacagggcactgtgggtataatactaagttgagatgatatcatttacgggggaaggcgctttgtgaagtaggccttatttctcttgtcctttcgtacagggaggaatttgaagtagatagaaaccgacctggattactccggtctgaactcagatcacgtaggactttaatcgttgaacaaacgaacctttaatagcggctgcaccatcgggatgtcctgatccaacatcgaggtcgtaaaccctattgttgatatggactctagaataggattgcgctgttatccctagggtaacttgttccgttggtcaagttattggatcaattgagtatagtagttcgctttgactggtgaagtcttagcatgtactgctcggaggttgggttctgctccgaggtcgccccaaccgaaatttttaatgcaggtttggtagtttaggacctgtgggtttgttaggtactgtttgcattaataaatt

SEQ ID NO: 959 - DNA, 1518 bp, Human
acgcggggtttttcttctcttgaatatatcttaacgccaaattttgagtgctttttttgttacccatcctcatatgtcccagctagaaagaatcctgggttggagctactgcatgttgattgttttgtttttccttttggctgttcattttggtggctactataaggaaatctaacacaaacagcaactgttttttgttgtttacttttgcatctttacttgtggagctgtggcaagtcctcatatcaaatacagaacatgatcttcctcctgctaatgttgagcctggaattgcagcttcaccagatagcagctttattcacagtgacagtccctaaggaactgtacataatagagcatggcagcaatgtgaccctggaatgcaactttgacactggaagtcatgtgaaccttggagcaataacagccagtttgcaaaaggtggaaaatgatacatccccacaccgtgaaagagccactttgctggaggagcagctgcccctagggaaggcctcgttccacatacctcaagtccaagtgagggacgaaggacagtaccaatgcataatcatctatggggtcgcctgggactacaagtacctgactctgaaagtcaaagcttcctacaggaaaataaacactcacatcctaaaggttccagaaacagatgaggtagagctcacctgccaggctacaggttatcctctggcagaagtatcctggccaaacgtcagcgttcctgccaacaccagccactccaggacccctgaaggcctctaccaggtcaccagtgttctgcgcctaaagccaccccctggcagaaacttcagctgtgtgttctggaatactcacgtgagggaacttactttggccagcattgaccttcaaagtcagatggaacccaggacccatccaacttggctgcttcacattttcatcccctcctgcatcattgctttcattttcatagccacagtgatagccctaagaaaacaactctgtcaaaagctgtattcttcaaaagacacaacaaaaagacctgtcaccacaacaaagagggaagtgaacagtgctatctgaacctgtggtcttgggagccagggtgacctgatatgacatctaaagaagcttctggactctgaacaagaattcggtggcctgcagagcttgccatttgcacttttcaaatgcctttggatgacccagcactttaatctgaaacctgcaacaagactagccaacacctggccatgaaacttgccccttcactgatctggactcacctctggagcctatggctttaagcaagcactactgcactttacagaattaccccactggatcctggacccacagaattccttcaggatccttcttgctgccagactgaaagcaaaaggaattatttcccctcaagttttctaagtgatttccaaaagcagaggtgtgtggaaatttccagtaacagaaacagatgggttgcaatagagttattttttatctatagcttcctctggg

SEQ ID NO: 960 - DNA, 2492 bp, Human
gttcgcgcaggtgcggcgcctgggtccccatggcgctgtggcgcggctccgcgtacgcgggcttcctggcgctggccgtgggctgcgtcttcctgctggagccagagctgccaggctcggcgctgcgctctctctggagctcgctgtgtctggggcccgcgcctgcgcccccgggacccgtctcccccgagggccggttggcggcagcctgggacgcgcttatcgtgcggccagtccggcgctggcgccgcgtggcagtgggagtcaatgcatgtgttgatgtggtgctctcaggggtgaagctcttgcaggcacttggccttagtcctgggaatgggaaagatcacagcattctgcattcaaggaatgatctggaagaagccttcattcacttcatggggaagggagcagctgctgagcgcttcttcagtgataaggaaacttttcacgacattgcccaggttgcgtcagagttcccaggagcccagcactatgtaggaggaaatgcagctttaattggacagaaatttgcagccaactcagatttaaaggttcttctttgcggtccagttggtccaaagctacatgagcttcttgatgacaatgtctttgttccaccagagtcattgcaggaagtggatgagttccacctcattttagagtatcaagcaggggaggagtggggccagttaaaagctccccatgccaaccgattcatcttctctcacgacctctccaacggggccatgaatatgctggaggtgtttgtgtctagcctggaggagtttcagccagacctggtggtcctctctggattgcacatgatggagggacaaagcaaggagctccagaggaagagactcttggaggttgtaacctccatttctgacatccccactggtattccagttcacctagagctggccagtatgactaacagggagctcatgagcagcattgtccatcaggtctttcccgcggtgacttcccttgggctgaatgaacaggagctgttatttctcacccagtcagcctctggacctcactcttctctctcttcctggaacggtgttcctgatgtgggcatggtcagtgacatcctcttctggatcttgaaagaacatgggaggagtaaaagcagagcctcggatctcaccaggatccatttccacacgctggtctaccacatcctggcaactgtggatggacactgggccaaccagctggcagccgtggctgcaggagctcgtgtggctgggacacaggcctgcgccacagaaaccatagacaccagccgagtgtctctgagggcaccccaagagttcatgacttcccattcggaggcaggctccaggattgtattaaacccaaacaagccagtagtagaatggcacagagagggaatatccttccacttcacaccagtattggtgtgtaaagaccccattcgaactgtaggccttggagatgccatttcagccgaaggactcttctattcggaagtacaccctcactattaggaagattcttaggggtaatttttctgaggaaggagaactagccaacttaagaattacaggaagaaagtggtttggaagacagccaaagaaataaaagcagattaaactgtatcaggtacattccagcctgttggcaactccataaaaacatttcagattttaatccgaatttagctaatgagactggatttttgttttttatgttgtgtgtcacagagctaaaaactcagttcccaaatccccagtttatgcagcgccatcaggtattttaagctaaacttcttcacccctgagagcatgtcagctggagaaaagcagttcttccttgcccacttgagaagtgcacgcccactcacccaacatcctggtctctaggaaagcctcatgtgaggttcctctttctttcagctcagtgcccatgggcaaggatcatgatttccattccgtgttacaatgacaatatttaatgagcataaccttctcagtctcctgctctcaaatttaggacagagccgctaaggacaaaacaatccctcccgtgctttatgatggcagcaggggctggggagcctctgagggactctttcattctgcagttgtctggaagcctgggtggcgtcatgagctgaaggatcatgctttcctgtcctggctccataggttataggctggctggtgaaaggttcacgtggcccaggctgaacttcattgcctagctttggatgtgctttctgccataaagactgatttttgttcgttctgagccttcaaggaatttgttttttacaactggaatatgctcctgtgtgtgttaacagatcatggatgttttatgttttcactgatcatttaaagagtttgacctcagagctccaggatcatcagtaaatttgtcatgttatatatttatttttttataaatcaagacttctgtgtgctcttaaatatattaaaaacaatttacatttcagg

SEQ ID NO: 961 - protein, 496 aa, Human
MALWRGSAYAGFLALAVGCVFLLEPELPGSALRSLWSSLCLGPAPAPPGPVSPEGRLAAAWDALIVRPVRRWRRVAVGVNACVDVVLSGVKLLQALGLSPGNGKDHSILHSRNDLEEAFIHFMGKGAAAERFFSDKETFHDIAQVASEFPGAQHYVGGNAALIGQKFAANSDLKVLLCGPVGPKLHELLDDNVFVPPESLQEVDEFHLILEYQAGEEWGQLKAPHANRFIFSHDLSNGAMNMLEVFVSSLEEFQPDLVVLSGLHMMEGQSKELQRKRLLEVVTSISDIPTGIPVHLELASMTNRELMSSIVHQVFPAVTSLGLNEQELLFLTQSASGPHSSLSSWNGVPDVGMVSDILFWILKEHGRSKSRASDLTRIHFHTLVYHILATVDGHWANQLAAVAAGARVAGTQACATETIDTSRVSLRAPQEFMTSHSEAGSRIVLNPNKPVVEWHREGISFHFTPVLVCKDPIRTVGLGDAISAEGLFYSEVHPHY

SEQ ID NO: 962 - DNA, 3240 bp, Human
ggccgttcggagaccagccccagcgtgccaggaccgtttccggggcctggccggggcgttgccgcggggtcggggaccagcacgagtgctgagtcacgccccgcccgggagcgcctcgggtcagtaactcgggaagacgaccaagcgggagcgggagcgggagcgggagccggagcgagagcgcgcgggcgcggccgacagtgcctgatttgagatggggtcccaggtctcggtggaatcgggagctctgcacgtggtgattgtgggtgggggctttggcgggatcgcagcagccagccagctgcaggccctgaacgtccccttcatgctggtggacatgaaggactccttccaccacaatgtggctgctctccgagcctccgtggagacagggttcgccaaaaagacattcatttcttactcggtgactttcaaggacaacttccggcaggggctagtagtggggatagacctgaagaaccagatggtgctgctgcagggtggcgaggccctgcccttctctcatcttatcctggccacgggcagcactgggcccttcccgggcaagtttaatgaggtttccagccagcaggccgctatccaggcctatgaggacatggtgaggcaggtccagcgctcacggttcatcgtggtggtgggaggaggctcggctggagtggagatggcagcagagattaaaacagaatatcctgagaaagaggtcactctcattcactcccaagtggccctggctgacaaggagctcctgccctccgtccggcaggaagtgaaggagatcctcctccggaagggcgtgcagctgctgctgagtgagcgggtgagcaatctggaggagctgcctctcaatgagtatcgagagtacatcaaagtgcagacggacaaaggcacagaggtggccaccaacctggtgattctctgcaccggcatcaagatcaacagctccgcctaccgcaaagcgtttgagagcagactagccagcagtggtgctctgagagtgaacgagcacctccaggtggagggccacagcaacgtctacgccattggtgactgtgccgacgtgaggacgcccaagatggcctatcttgccggcctccacgccaacatcgccgtggccaacatcgtcaactctgtgaagcagcggcctctccaggcctacaagccgggtgcactgacgttcctcctgtccatggggagaaatgacggtgtgggccaaatcagtggcttctatgtgggccggctcatggttcggctgaccaagagccgggacctgttcgtctctacgagctggaaaaccatgaggcagtctccaccttgatggagaggccaggcgggagaactaccgcagcaggtgggcgtacggactgcttggcgcatggcacccgcctggcaagtgctagaactaatgctattcttctggaataagatgccaatgatgtggtggctagaaatgcaacttgtataaaacaaaaatgggagagagagaggtattaaacaaataccccccttagaggatactttctgggtttggaaggtgtgcttgctgtggtactgggtgagcggctcatgtgtgctggctgcatggtgctggggaggccacagccagcccttcctctgcacctgcctcctctgggatgtgcatgtgtgtgtacgtgcttgtggtcatgacgcgtgccatttagagctctcagagcagggcagattgctgggctctggtggccagtgtctgtctgtgagggcaggaaggagagctgcacattgagaacaaaggagggacctgaggtggagagaggcccagcaccccaaatctctgccatcacacggtcggggagcccatacattctgcaacaaccagggacttcacaggagccttgttttcaatttgctaacaggtgcataatccctgtgctccttaagcctcatggccttcctacatttccactttatttgtttgtttgtttatttatttttgagacagtctcgccctgtcacccaggctggagtgcagtggcacgatctcagctcactgcaacctacgccttctgggttcacgtgattctcttgccttagcctcccaagtagctgggactacaggcacgtgccaccatgcctggctaatttttgtattttttaaatagagacggggtttcactgtgttggccaggctggtctcgaacacctgacctcaggtgatccattcgtcttggcctctcgaagtgctgggattccaggcgtgagccactgcggccagcacatttccacttttagatcctactccataccacaggtttcatttaagaagaaagagctagataaatgtgctcttctggttaccccaccctgacagagtgcatttttacacggctagcaggggttgagactgcagcctggcctgccagccattggaggtgtttaaggaagggcagataatgtgactctttgcggggtgccatctgcttacccattagcgagcagagggggtttctgcgggtgacccccagcatatttctaggttacttatgggcagatttgtaagtgacaaaactccagctgatgctgggaatggggagagggcccttgagggactttgtggttttgtgcttctggtttcctggccaaccccagggtcacttgtctggaggcccagctgggcactaatgtctgccaccgactatgttacagtgtataaatgattcctctatttgggagagatcttccaatccagaggagcccctcttggactgcctgggttaaatctgcatagcagaagtggttgatgagttcatctgaagaaattcaggccccacctccccaccctgcccctccctgctcccttttgatggtggcctctgggtactcgggcagagtccttgggacaccagcctctctggggttctcaggccatcccgttggggctgtcgcccaggcctaagtgagtcgtgtgcctctattggaggatggctgttcccctggtggttgcatccaagtatctgtctttctttatggaccacgaagggaagcccaccttcctggaggcaggaccttcggcctaagaaacacaggccctggtgctatctgacctggggtccagcgaggtgggaatcccagtgtgtgagcgacaggccttcttctattgacttacaatattctagaaggacctacgtgtggggacacagttttccaaactgaggaaaatgttgcaataaaagaatatgttgtaag

SEQ ID NO: 963 - DNA, 3921 bp, Human
ccggcggccggccgcggcttccgccccctcccgtggcggcgagcgggcgggcctccccacacgcccccgccgcccgcgccccgcgtccacccgcgccccgctcccggggactgggagaacaggatagcagcaggagtcggggggccgccgaagatggggaacactacctcgtgctgcgtgtcgtccagtcccaagctccggaggaatgcccactcccggctggagtcctaccggccagacacggacctgagccgcgaggacacgggctgcaacctgcagcacatcagcgaccgggagaacatagacgatttgaacatggaattcaatccttcagatcatcctcgggccagcacaatattcctcagtaaatctcagacagacgtgagagaaaaacgcaagagtctcttcattaaccatcatcctccaggacaaatagcaaggaaatacagttcctgctccaccattttcctagatgatagcacagtcagtcaaccaaacctcaagtatacaattaaatgtgtcgctcttgcaatatattatcacatcaaaaacagggacccagatggaaggatgctcttagatatttttgatgaaaatcttcaccctctttcgaaatccgaagtgccaccagattatgacaaacacaacccagagcagaagcagatttaccggttcgttcggacactgttcagtgctgctcagctgacggctgaatgtgccatcgtcaccctggtgtaccttgaaagacttttaacatacgcagagatagatatctgtccggccaactggaagcggattgttttaggggcgatcctgctggcctccaaggtgtgggatgaccaggctgtatggaatgtggattactgccagatcctgaaagacatcacggtggaggacatgaacgagctagagcgacagtttcttgaattgctgcagttcaacatcaatgttccttccagtgtctatgccaagtattattttgatcttcgttctctggcagaagcgaacaacctgagctttcccttggagcccctgagcagggagagggctcacaagcttgaggccatctctcgcctctgcgaggacaagtacaaggacctaagaagatccgcgaggaagcgctcagccagtgcagacaacctgactctgccccggtggtccccagccatcatctcttaactacggaggcccgccggaggccacaccatcccttagtttctcctttagtttgagaaaagacagacttggggtgggtttgtttttgttttttctttccttttctttttttacgcatagctccgtcaagctgcctggatgagcgcccatgcagcaaggcttggaggaagcgtcagtgccctggagatcccagctcgctctccccactgtcagcaacagcacttccttcgtggaggaagtggactcgaatcctggaggaggaaataaagggaaagggaagtcgtggagaggcagggaaaatggttaagcagcccggccctctggagtccccatgggggcggtagctgaagttggcgagcgcagcggtggatgcagagctggctgcacccagggctgggccagtgtgtcctgtaagacttcttgcattccttctgctgcttttttgggatgggggtatttttgttcatttgtttttgccctgttttgattttggtcccacagagcaggggatgtagtttgtacccaccatggcgcagacttccaaataaatagtactggtcatttctctctgcactatttctgcgcgctgtcttctgagctttcttcctcaccagtgggctgtgcttgttccatttctgtacacccttattttataccgtttttcttcaacaatggcgaaattgactgtagtgctgaaccaaaagtatccctttccctccttattcctcaccccaagaacattctagatcacatgggtgcttgtgccttccgattttcttgcatttgtttttttcctgacctgaagttgttgttacaaaatcagtcagactttgtgggctgaaggacacggtgcagcagagggtgtccctgtgagagttctgcagagtgctgggcatgtgcctggaactaccgagtaggagccatttctttgtacccctgcctaatccattcctctccttccaagtccattgttgcaagcaatattcttctcaatttttatatgtttactttaaatcaaagttagtctatttgtataaaatttttaaaaaatctaaaagaaaaagaaaaaaaacaagggtgggttgggtattccagtgggaagatcattgaagggaaaaatgttactatttactgaggtatttttcacagaatgattgaattaaaaaaaactcaacttgcattttcattgtgggtgcttagagaagttctacaaaattcaaactgtgaaggtttatgcttcattaattatgaccatactttttcattttctgacgatccctgatttccttatggactcaataagaatcttttatatcaagtaaaatgaaagttgatgatagaatatcaaatagtgaatttgatatgaaatctaagagtgtgagtcacttgcatatgtaatgctttgggtttttgcatattttcttaggtcacagtgacaggtttctgagttgtttcccttttcaagtctctgggaggccagtggcagcagcaggtctgtgtttcaccttcttcccatgtgagcttggaaaactttggcatcttaattagtcttgaatcatacacctgatccccaaacattgcctgctctcaatgaaacatgctttggaaatggaagggactcagaaagtcgaaatcccaagaactccaagccaaaagtgttaggttttagtgaaatttgtgtcaggtataagcatacctgtttgggccagaattattatcacagcctttctgacccaaactttcaaaagcaaataaacagcatataaaacgttaattatctttccattgtaattgtgatgatctactctgtatgggtaccaaaatcaccttctctcttcaagtcaaagttgaatttagaactttgaatacaggtcaaaaaatgtagaaaatatcattttatattccctaatctatatagctgaaaaagggttgtattttcttagctgaatatgaatacctcttaaacataaattagttcctctccagtgaagtatcttattttaccaatccatttcaggaaagaggttctgctgccgtaaaggcagaaattttatttttatcccttttatttgaatgagagatttgaaaatcgaattatgtaaatatttcaatgcatctgctattattttgtggagtttattaaactactttaaaaaaattgtatagtctatttattgtatgtatgtacatacagtctgatacctaaaatttaaagtggattccataaaaccagactcaagtcttgtttagactactgaatactgttttagcctgtgccctggattctacctctgtataggaaaattttccatattcattaattagtgttgatctgtattaattggttatgtttcttgcactaaggatgtttaaaactccgctgtaagtgtagattttagttttactggcaggatgaatcacttgacacataggtagatacttgaggttcattttcttttctttttctacatgatgatgaatagttatgttttcttctctgatttgttcaaagtttgccaaaagaaaacacaaaaccagtacagtacttactgataaatcgtagtgactgtaatttgtttgtaaggcgaattaatgctctacaattaaagctggattactattgaggaacacattgtcttagtgtagtttttgaatggaaagtttttgtcattaaggatgaaggaaacgacacaatttgttactttaattttatatttgatttaaacaacaaataaagtcattggg

SEQ ID NO: 964 - DNA, 3695 bp, Human
aatttactatgggcctattttatatactgctaagcctgggctgttcctgctcatgactgctaaatgagcaccagacatttaggtacctgaatacttgtcattttggggcaaaagaaccagcttattcttttgctccagaatgtgttcaaattagattttattcaagtgtcaataaattttataatgttttcttccctatctaataggaaatccccatttggaagtacagaaagaaagactcctgttaaaaagctggctcctgaattttcaaaagtcaaaacaaaaactcctaagcactctcctattaaagaggaaccctgtggttccttatctgaaactgtttgtaaacgtgaattgaggagccaagaaaccccagaaaagccccggtcttcagtggacaccccaccaagactctccactccccaaaagggacccagcacccatcccaaggagaaagccttctcaagtgagatagaagatttgccgtacctttccaccacagaaatgtatttgtgtcgttggcaccagcctcccccatcaccgttaccattacgggaatcctctccaaagaaggaggagactgtagcaaggtgtctgatgccatcaagtgttgcaggagaaacttcagtcttggctgttccttcttggagggaccactcagtagagcctctaagggacccaaatccttcagaccttttggagaacctggatgacagtgtgttttcgaagcggcatgcaaaactggagctggatgagaagagaaggaaaagatgggatattcagaggatcagggaacaaagaattttacagcgactgcagctcagaatgtataaaaagaaaggaattcaggaatctgagcctgaggttacctcatttttccctgagccagatgatgttgaaagtttgatgattacccccttcttgcctgttgtagcatttggacgaccattaccaaaattaactccacagaattttgagctaccctggttggatgagcgtagccgatgcagattggagatccagaagaagcaaacacctcaccggacgtgtaggaaatagctgtgctggcaagaaccctgtcttcagatagttgtagcatgccattcccgagagtggcagagacctgtatatgtgacctttgtcctcacatatgttatcactcgctgataataccctttcatacttccttgactttgttttcattactctgatttcacaaaaactctttcattcggctaattgtgagttatggagggtgattgggatttcttttcccttttttgggaaatgggctctcaagctaaagctataggatggcagattcagaagtttcaggggtctgtttctatacatttgcctatgttaaaggggtaaaagggctctcttcattagacatgtggaagatgaagcagccccttcctttagagctgtgcctgcatggcactcttctcaccctggtacaccctccttatagtgggtatagtgatttttaaccctaaaataaaacaaacaacctcaccatgagctttaggaccagaagaggaatgacaagtgaagcgatgaagcaagccatcttcacagagtagaaaagacatcggagagttggtagataactgtctgaaaagatagttgttcatttgaaactattctgtgatacagtcatgtgggaagggatgtttggctgtgattattttttcagttaatggataacaatttctttactgctcaaaaaccaaaatctttggaaaagaaagtggggatggttagtttcagaacaagttacagctgtaaacaaaagcacttagtatttgggatggcatgccaaaacctgtataaatgtccttgtatcacatcacttctcaagtattccttcattgggcttcatccttttagcagaactcttggtggtgggatagagacttagggagggtagggggagagtgtggaaataggtgcttcctttggctggcaaatgtctacatcttgaaacaaacagatgtacctaatgagcttctccattcactttgtaaaaataatttgtatgtgtaccatcttggtcctctcccctcccgttttgttaaaatatcaggatagcactcccaggccactttggtctcagtgtaagatccctattaactatctgaaaggaaaatagagccaagacctctggtctcaaatatataggaattgcctttctttagtcttcaggactattgtgtgaaaacaagtaggggtctaatctcctagaaggtaggggcttttatccttaaagagaatatgtccccagattattagcacttttagaggagaagccaaggtatgtagggtgtgtggctggcccatcagtggagcacgaagagagaatgggataccattgtgggaagagaagaaaagttcctcaggggcctcccactgctaaagttttttgtgagatgttgatctgtgcttcctggatttgacttttaaaggaattattctggcagcacatgtagtattcttggatgatcttgctgctcttatttctccttttgtgtgtgtgtcgtgtgtgtgtgtggctatgggttttcatttgtaactccatctgcttaggagagtgggctctctataagggaacctgctgtaaacttcattgcagcaaggatgtagagagaaataggacttaattccactaggggctctcatctcacaccttaaggaggagatttctagaaaaactgggccagattttctttgttctccatcattttaatgtggcaggctgttcagttttcttactcttacctatgtgatatttcttcgtaacgtgtccaaaaagaaaaaagacccaatcagtgtctcttgactttgttctttgatccctcagtttcttcttgatttcagcatgtgtcgggttcctaattttgggtatgagttagcaaatttaaccattgtgtttgtgccctacccaggggactccccagtttctgacttgaagtagactgagaagaatccacgaggtgctatctggccagatttaagtagattctatttccttggttctccctctccctgaggacctcttattttattgtcccctcttctaggttaattctcctttgatttgactttgttgagaaggaggttggacagtagattagcaaagttccaagtgcaaaattacagtgtgttagagtgtggggggaaaattagtcttatttttccctacatgggatacaacactgtgaattcaatcttcaactgaaggccctgcagttctcctaaaacatagttgtttgtttttctttaacaaagtttaagctagtgttaataaattaaaaaaaattgcttgtctgtctacttcagctttgttttatgcccatttcatattgttgtctgtgttgtaattcataacttttgataccatttctgatgtgtaaaattggttgtcttgtaaatatcttataaagagttcaattgtaaataaactattgtggctgttaatttttgaacttctgcttcaatttattatatttattggcaaacaaacaattctgcttgtatatttgaaacattggaaaaagaaatccattttctcaataaaaaagaataacacattattttccccgatataataaggtactcacttccatttgtgtataagtataatgtatgtgtcatccctctttgtccagtgtactgccttaagtataatcagc

SEQ ID NO: 965 - protein, 291 aa, Human
MFSSLSNRKSPFGSTERKTPVKKLAPEFSKVKTKTPKHSPIKEEPCGSLSETVCKRELRSQETPEKPRSSVDTPPRLSTPQKGPSTHPKEKAFSSEIEDLPYLSTTEMYLCRWHQPPPSPLPLRESSPKKEETVARCLMPSSVAGETSVLAVPSWRDHSVEPLRDPNPSDLLENLDDSVFSKRHAKLELDEKRRKRWDIQRIREQRILQRLQLRMYKKKGIQESEPEVTSFFPEPDDVESLMITPFLPVVAFGRPLPKLTPQNFELPWLDERSRCRLEIQKKQTPHRTCRK

SEQ ID NO: 966 - DNA, 558 bp, Human
  unsure 121: unknown base
  unsure 125: unknown base
  unsure 126: unknown base
  unsure 127: unknown base
  unsure 147: unknown base
ggggaccaaggagaggcgacattcccataccattggtggtctgcctgaatccgatgaccagtcagagctgccttctccccctgcacttcccatgtctctgagtgcaaaggtccaacttacngacnnngttcacggctcagtgctgtncctggcctccagtgcctcctccacctactcctcagctgaggagaggatgcaatctgagcaaatccggaagcttcgtagggaactggaatcatcccaggaaaaagtggccaccttgacgtctcagctttctgccaatgctaatctggtggctgcttttgagcagagcctggtgaatatgacatcccgcctgcgacacctggcagagacggccgaggagaaggacactgagctgctggatttgcgagaaaccatagactttctgaagaaaaagaactctgaggcccaggcagtcattcagggagcccttaatgcctcagaaaccacacccaaagaacttcggatcaagagacaaaactcctcagatagcatctcaagcctcaacagcatcactagccattccagcatcggcag

SEQ ID NO: 967 - DNA, 2715 bp, Human
gtcgggtgggggcggcggccgcggaaggccaggccggtgccctgcggggacgcccagcgcagcccagccccgcgcagcccagccctgccctgccctgccctgccctgccctgccctgcgcccggggcgcgcccaccgcgccgcatccatgttcgacaccacaccccactctggccggagcacgccaagcagctccccatcgctccggaaacggctgcagctcctgcccccaagccggcccccacctgagccagaaccaggcaccatggtggagaagggatcagatagctcctcagagaagggtggggtgcctgggacccccagcacccagagcctaggcagccggaacttcatccgcaacagcaagaagatgcagagctggtacagtatgctgagccccacttataagcagcgtaatgaggacttccggaaactgttcagcaaactccccgaagcagaacgcctcattgtggattactcctgcgccctgcagcgtgagatcctgctccagggccgcctctacctctctgagaactggatctgcttctacagcaacatcttccgctgggagaccacgatctccatccagctgaaggaagtgacatgtctgaagaaggaaaagacggccaagctgatccccaacgccatccagatctgcacggagagcgagaagcatttcttcacttcctttggggcccgtgaccgctgcttcctcctcatcttccgcctctggcagaatgcactgcttgaaaagacgctgagtccccgcgagctctggcacctggtgcatcagtgctacggctcagagctgggcctcaccagtgaggatgaggactatgtctcccccttgcagctgaacggtctggggacccccaaggaagtgggagatgtgatcgccctgagcgacatcacctcctcgggggcagctgaccgcagccaggagccaagcccagtgggttcgcgccgtggccatgtcacgcccaacctttcccgagccagcagcgacgcagaccatggggcagaggaggacaaggaggagcaggtagacagccagccagacgcctcctccagccagacagtgaccccggtggctgaacccccgagcacagagcccacccagcctgacgggcccaccaccctgggccccttggatctgctgcccagtgaggagctattgacagacacaagtaactcctcttcatccactggggaggaagcagacttggctgccctgcttcccgacctctccggccgcctcctcatcaactctgtcttccatgtgggcgctgagcggctccagcagatgctcttctcggactcgcccttcctccagggcttcctacagcagtgcaagttcacagacgtgaccctgagcccctggagtggggacagcaagtgccaccagcgccgggtgctgacgtacaccatccccatcagcaacccactgggccccaagagcgcctccgtggtggagacacagacgctgttccggcgcggcccccaggccggcgggtgtgtggtggactccgaggtgctgacgcagggcatcccctaccaggactacttctacactgcccaccgctactgcatcctgggtctggcccggaacaaggcgcggctccgagtgtcttctgagatccgctaccgaaagcagccgtggagcctggtgaagtcgctcattgagaagaactcgtggagcggcattgaagactatttccaccatctggagcgagagctcgccaaggctgagaagctgtctctggaggaaggcgggaaggatgcccggggcttgctatccggcctgcggcggcggaagcggcccctgagctggcgggctcacggggacgggccccagcacccagatcctgacccctgtgcccgggccggcattcacacctcgggctccctcagctcccgcttctccgaaccatctgtggaccagggccccggggcaggcatccccagtgccctggttctcatcagcattgtgatctgtgtgagccttatcatcctcatcgccctcaacgtcctgctcttctaccgcctctggtccctggaaaggacagcccacacctttgagtcctggcacagcctggccctggccaagggcaagttcccccagacggccacagagtgggccgagatcctggcgctgcagaagcaattccacagcgtggaggtgcacaagtggaggcagatcctgcgggcctccgtggagctcctggatgagatgaagttctcgctggagaagctgcaccaaggcatcacagtctcagaccctccctttgacacccagccccggcccgatgacagcttttcctgaggaccccggccacgcagctgttcccccacatggacagatggacacacagagcctcggcggccactgctggcacggtgtgagcgccaggcatctcccacccgcccctcccgacggcccaaccaggggctgtgcagacgtggggaccacggaaccgagatgcactttagaccagggagctggcccggcctctggcaggccccccactaacttattttgcccggctgaggttgtggggggcgcctcctggggtgcacgattccctcagctctgggtttaatgtattatatttatttggggccgacagtgccccaataaagggtcagaagtgaaaaaaaaaaaaaaaaaaaaaaaaaaaaaaaaaaaaaaaaaaaaaaaaaaaaaaaaaaaaaaaaa

SEQ ID NO: 968 - DNA, 1095 bp, Human
acagatcagctccggagaggggaaaaccacgctcctcggaccaagcctcgggagctaagccagatctgccagtgagcctcaggctttaggaactgaagagtgtttctgaaagatctatccagcactccgatggccagcaacaacaccgccagcatagcacaagccaggaagctggtagagcagcttaagatggaagccaatatcgacaggataaaggtgtccaaggcagctgcagatttgatggcctactgtgaagcacatgccaaggaagaccccctcctgacccctgttccggcttcagaaaacccgtttagggagaagaagtttttctgtgccatcctttaagtctttgagaggggcctgaagagcctccgggctcctgggacattgatgtagagtttttagtgaagtgggcacctttctagtccacggcatttgaagagagcgaggagaaccattctggaaactctaggctatgcatgtttaaagatctggtcccctttatgagaatgcaagccgatccacatcctgacttaagagatctgattctgacgaactgcctggaggaggggaatatataaaaataaaattggtgtcacttcttttctgctatccccccccccccaaaatcctcatgtttctgcttcatattttgaaaaataacaattaaaacagacagctgtactgaggtaagatatgtgtgaccttcttggaatgaatattgtctttagaataccctttgataagctgagctgtcccgtgtagatgcaattcggtttaatggcattgatgtatagtcactgtgcctttctttttctttcttccttctcctctacccctccttccacccctccccattagagtagtgtggagataaggctggactggtctatcagattgaactccaagaatgatcacacaaaatgtttagggagatgttccccgtggtgtatcctcatggtaacaacgacaaaaaatgccggttgtctttgttctcttttcactattcctaacatgtgtacatgatagctttgattctgcaagtaaaagtaaatcctgtgttgccaaaaaaaaaaaaaaaaaaaaaaaaaaaaa

SEQ ID NO: 969 - protein, 71 aa, Human
MASNNTASIAQARKLVEQLKMEANIDRIKVSKAAADLMAYCEAHAKEDPLLTPVPASENPFREKKFFCAIL

SEQ ID NO: 970 - DNA, 3361 bp, Human
ctgggaaattaggtgggggtgcttaagggaggtttgtaggagtcctcggacgtgggatagatgggggtatctagggcttggatggtttgtggaatgtcctcagcatcctcccgtcccagcccaaccttccttcttcctcattgtggacttggatttattctcaggctaggagtctccaaaactccgtgaaaccttattgctgctgggtgtggagtggagagtgacaggaatgtgggggacggtgattgttggctccagttactaatgtttaagcagaaaaaccactttcttgttgaaaatatccctgaaaaggtcgctgctgctttgaggaggcgtgactttttcctggtggagtgtgacggaggcatggggcctgtgctcccaggctcgggggagccccctctgcacacggggagggaggaacttggggacatcagtcatgggtcacaggtggcttcaggccattcacaagagtccccggaagttgcgtgccaagtttggttttttccctgaatctctgcatatgagcatttttctggagaaaggaccatagcttttattagattctcaaaggttcagaatggggaatgtgttaaacaaaccgaaaacctgtttcagctttaaaatcctccaaaactttaaagacttttcttttttctgagaaaggctggtaaatcactgagtcatcattcagaacatacagcctcgaagggcagagctcacacccatatatgacgttaagagctcaacaaatgtttgttgagtgactgagtgaccccaggggcagactccagatcatcagacactgatacagagagcgatgctatctcctcaactctccctcttctcctaaaagctgagtctatatagggatgacaggctcaggctgagcagtcgacttctctgggttttgctgtgtaagaataggtccctcaacatgaagatgtgtctgcgtctgagccagatgctgcctgggtcggttgcctggcctccgtctggtctccctccctcctactagggtggtcaagctgtgagatctcttccagcctccaaatccagctttcccattttactgatgagaaaatcaaggccacattgcagctgggtggggagtggagcgtgacaggcacgggagaggacagcgattgttgactctagttcctgatgtttaatcagaaaaaccacttttcctgtagagcacatttcctaaaaggctgctgctgtgtagggaggtgtggccttttcctggtgcagtgtgaaggagggaagtgacgggcagtcgtgaactgtctgggacagatagcacaagtcagagtttgagcaaaactagggtgttaccggcgctatgttgaaattgtctggaggcgggctttcccagcgagtctccattcagcatctggaaaaagtgtaaccagaatggaggtgtctgactctcctgtgctctctcagcgccgagctctagctgcaggctgcctgggtggccttctcacaccctcccgtgcaggagactgcatttctctttcccacagcccagcagatagctcattggcttagcaatgggcacttaacagaatccagttgttgcagccagaattaaatgcaccagtttggcttaaaccaactggaactcatccctggggtgaaggtggctgggaattagacaagagtgtgtgttagccaaaaggcacatgcatgctgtcagcaggagaatgaggagcactggttctgggcaggcagtggcaggggctccctcaggcccctgaatcccagcccacagctctttctactctgcagacagagttccttggagactggccctgcattcaggcagggagcagaggggtccctgcctgcagcacccagagctgaacctgaagctacaaagatgggctgatgaggtggcccatgaggtgtcagcaacatcccaacccctgggtatccccagtgagtcagggcactgatttgctatagctggagctacatgcacctctcctcccctcagccaccttttaggggagaaaggagggcagatttgtaacctctggttctctgcagggatcctgggctggaagaaagttcataaatggatgaatgccttttaaaactccagcttttccaagcatcattcaccaaagcatttggttaggcttagagagaaaagctggatatgagaaaatagaatgtaaaataggaggggaggttgagaggctttgatggaatcccattctctgctgtggccagaaggtggtgctagaggccagtcccacttggatgtgaccctggcctctgccaggattcaaaccacaaagaacatttggaactgggatgtttgctttgaagcagcctgaaaacaagtgaaaaggaaaccaagataactctctctccctccgctggcaaggatcaaaaataccttgtgcagggaagcccgagcctcgaggggccactgcccagctaaagatgactggacaccagccatgcaccatcaggaaccagcacctgtcctcacccctgagaagagccccgggggtatcattatatccatcgcagacatctggtttgcagcaaatgtggctacacgccatcaggattatcctgccctgtggactgggctagctagttttgagatagagtcaacctccccatttttgtttgtcatgaaaacaccagctcctgcacccctggggtgctacctgacacctgtgcaaagaaaaggaggaaaacttagaagaaaaggcagagacaggcaagacagcatctcacagcttgtcaggatcagggcattaccgactattttttcttaccaaaagagcactgaatttcctaggggaaggtgagccacctttacacctcctgtcctccctcccagcccgtcaagcgatcccatcacccagcctcatcactcagcttcttcctagtacaaaactgccatcggttgtacgtcctgagctgtgggacgtcagctttaaccctagcctgtctcagggcctcgccctccagccccccgccccttagggtgatcgtgggtttcttcccttcctcctgcacaatcgcttcccttcactgaattcccttcaaagccaaagtttcttgagcactttttcttgtgtgcagtcttgtgtgtttgggtgttggtgtttttaaatttgctttctattcccccctgcctctctccatgtcgttacgcagctgagcactggttgggatgcattcgaatgacttcagcaagatcctgctttcctcagcccccgctctgttttatttattgtttaatatttccaatgatccaaatcaaagtgaataaacaaagagctattttattgtttgggggtgtttgttgcttttctacaagggtcatgcattt

SEQ ID NO: 971 - DNA, 522 bp, Human
  unsure 57: unknown base
  unsure 84: unknown base
  unsure 90: unknown base
  unsure 92: unknown base
  unsure 93: unknown base
  unsure 94: unknown base
  unsure 95: unknown base
  unsure 96: unknown base
  unsure 97: unknown base
  unsure 197: unknown base
gtgagccaaagcctatagtaattgcagacagcaaatgattccggatctctaaaaggntctctcagatgaaaagggagtaaaggnaaaaanannnnnntcaaccactgtttctgataatgtacttgagtttcattgttcttttagtttgtattcttataaaaaatgtttacactctgcagattgattttttttttttnagtactgtggctttcttttcctattttatgaaaaaaatgataatctttttgtaaaattgtctgtgaaatataaacattaatatataaagaaaaaccttgaagtgctgtatagtgaagtataaattaatgttttattgatttgtgaagaatttaagactattatataattatcttggtggatctattttatgcatgaccttttaacctttgactttgcttatttcccactacgaaggggaaggtagattttatgaatgattttaatagcaaatatattttataaagtgaaaatccagtgtggaggtagcaaagcatctatctattc

SEQ ID NO: 972 - DNA, 4577 bp, Human
ctgggctctgagggcgaaggcttgggggagacctggcttagccacccggctagccgcgtttggcatgggcaggtctgtctctgctccgaggcatattcccactgggcagtgacgggggaagcttgggacccgctatccgctctttccgtcctccaggctggcagccctggaggcccgcgtggcgcagctgcgagaggcgcgggcgcagcaggcccagcaggtggaggagtggcgggcgcagaatgcggtgcagcgggcagcctacgaggcgctgcgcgcgcacgtcgggctccgggaggcggcactgcgcaggctccaggaagaggcgcgcgacctgctggagaggctcgtgcagcgcaaggcgcgcgccgcggccgagcgcaacctgcgcaacgagcgccgggagcgggccaagcaggcgcgggtgtcccaggagctgaagaaggctgccaagcggaccgtgagcatcagcgagtaagagtggggatgggccggtccgacccttgcgttctgcctcccgccccgcctgcctgcggcgacccaggctgccgactgtacttgtgcacagccccgtcctgaggcccccatgtggtcggggcccacgagacacctgcagaggaccgtgtggtcgtaggagcctgcatgcgtgaccgctgcacgtgtacacccacacagaaccctcatcactgggaattcctgtcttcagcgtatcctgtgctggggtcgggaggggctggcttggtcccttggcctttctgaacttcattacctctcctaggggcccggacaccctaggcgatgggatgagggagagaagggagactctggctctggcccctgagccagagcccctggagaaggaagcttgtgagaagtggaagaggcccttcaggtgaggacccaggtgacagtctcagagctctgagctgagccccaccccagaggctgccagggtcttcctcttggaccttggagccagctcttgggttgggagggggcttgaggagaggccagaaagctcagatctcccagggctagtctgacctccattgtctggagccacttggggtcagttccatctcacccccccaacccctaccctcaaccctttccctccttcttgggatcagagctctgggggtggggagtcaggcttctgaatagctgtcaccaggagagaacctgtgggcaaagcccagagcccagtcatgccaggcatgtgtgcgcagccataggtgtgcaagcatgtgcatccgcagggacatgaggccacaggtgtgtacaagcttgactgagcccgtctgtatgtgtgaatatataagcatgtgtagatgtgtgctcacacttgtgggacctgattggggcttcagaccttgggtgcctgtccgcagggtctcctccatccttcttgatttgcctgtcattgaggctgcccgctctgggcgccattccccagcctaacacctcttctcagtctttccttgcaggtccctggtgtccaggccttggggcagtgaagaaaccgtggggaggggcatgagatgccagtccccaaagtccttgggagcccttgtgggccaagtcattgtaggacacaccctctcctgggcattgctgaggtcacccagtgagcctaggctcccccctcctcccatccccagcctgggggaaccttcagcgtctctcctccctgtaggccccggctcagcttcccaggaacttttgttggtgggtactagtagggtaaggcagttcttcccatcatgagggagaccttgggagactttcattaccaaatccattgctgccccgaccttcctgggactgatctgggtcaccctggtctcctgatcttggagaagtcaagttcttatcccagacttgagaggttacaagcctccaggtctctggcaaagtgtggagatgatggacagccatttgtacacacaccagccagtcccttagcatatctctcttggttttgtctcaggtctgcctcagccacctccctgacgctgtcccactgtgtggatgtggtgaaggggcttctggagtaagtgtgtgtgtgcctgtgtgtgcacccacgtgtgtgtcgggctccccagcccaggcttggtctgtgtctgtgcctcgacctgtccatccctgtgatgtgcagctgtctgcctgtgagtctgttgggccttggagacaggagccaggtgaatggcctcagccccggccccggttcagctgtcttccaggttctgtcctcacaagggtctgtcttcatccaaggtcgtcacaggggaccaagagctccagcctcaggcagggcaggagctcctactcaattgggaaaaatgctctgaaatgtcagggactcattcagagtcacagagccaagcagtggcaagactgggattgaaaccccggccctgaggtttctttgcacccaccaaccctaccctgctcctgtgtctgcctctgtgtgctccccaccccgtctccacaccaacccctggggtcgaggctgggttggggaatgctctcgctgctccttggggccatgttctgccgcctgccatgtctgcttcctatggttgatgcctcaggggagctggaggctcccacctgagaaggacttgctgaatgccctcctgaccccaacccaccttaccccagttttaagaagaggagaggtcactcaattgggggagcccctgagcagcgataccagatcatccctgtgtgtgtggctgcccgacttcctacccgggctcaggatgtgctggatgcccacctctctgaggtcaatgctgttcgttttggccccaacagcagcctcctggccactggaggggctgaccgcctgatccacctctggaatgttgtgggaagtcgcctggaggccaaccagaccctggagggagctggtggcagcatcaccagtgtggactttgacccctcgggctaccaggttttagcagcaacttacaaccaggctgcccagctctggaaggtgggggaggcacagtccaaggtgaggcctgactggggaggctgcctggaggtcagaggtcatacctcaggactagggggcctgttatggggtcttggccaaactcttgatccgtacctggggccggggtacaggagacactgtctggacacaaggataaggtgacagctgccaaattcaagctaacgaggcaccaggcagtgactgggagccgcgaccggacagtgaaggagtgggacctcggccgtgcctattgtgagcccgagccccagccccacctctcctccccaccagccaggagccccaggccagggcacaagggacctcacctgctctctgggagtggctctgagattcataggcatttgggggtgaaacctctcaaggccctccaattccctaatggtatcccccagtggtgttttctgtctggtttcttggtgacctcaggctgtgggtaggaaaaagacgtgggtgagccctgtgctgggaagcggaagacctgggttctagtcttgggaggacaccgggttctgggcctcagcttctccatatgtcctgtggggtggctcccgacaaccctcctctgaggccctggggtctgctgcttggtccccaggctccaggaccatcaatgtcctttcctactgtaatgacgtggtgtgtggggaccatatcatcattagtggccacaatgaccagaagatccggttctgggacagcagggggccccactgcacccaggtcatccctgtgcagggccgggtcacctccctgagcctcagccacgaccaactgcacctgctcagctgttcccgagacaacacactcaaggtcatcgacctgcgtgtcagcaacatccgccaggtgttcaggtaccagcctcatgcctgctgaccctgtggcctttgctgggacagctgagcctctcttctcctgtaatagaccctcttggagccctccctggaggcccctccagaccaggtcctgctgaggtaccaaacccctcgacaaagaggaagctctggaagctcactgcagagggcagagactagtgatgacctctgttctgaccccagccctgtctgtcctcagggccgatggcttcaagtgtggttctgactggaccaaagctgtgttcagcccggacagaagctatgcactggcaggctcctgtgatgggcccctttacatctgggatgtggacaccgggaaactggagagcagactacagggaccccattgcgctgccgtcaacgccgtggcctggtgctactccgggagccacatggtgagcgtggaccagggcaggaaggttgtgctctggcagtagggccacgacctgcctgcctgggctggagctcttgcccgaagcctgaagcttccttcggcgccatgcaggggttggggttgggactggagctggccttgggatttaatggggaagaaggcctggcaggacctggcctgtttgtttaaaaatgaagtatgggttgggggattacgctagtttttctttgtatttttatctctatctcctcactttttctcccaaagtagaaaaaaatgatatctg

SEQ ID NO: 973 - DNA, 3246 bp, Human
tgcggtgcctgcgcccgcggcggcggaggcgcaggcggtggcgagtggatatctccggagcatttggataatgtgacagttggaatgcagtgatgtcgactctttgcccaccgccatctccagctgttgccaagacagagattgctttaagtggcaaatcacctttattagcagctacttttgcttactgggacaatattcttggtcctagagtaaggcacatttgggctccaaagacagaacaggtacttctcagtgatggagaaataacttttcttgccaaccacactctaaatggagaaatccttcgaaatgcagagagtggtgctatagatgtaaagttttttgtcttgtctgaaaagggagtgattattgtttcattaatctttgatggaaactggaatggggatcgcagcacatatggactatcaattatacttccacagacagaacttagtttctacctcccacttcatagagtgtgtgttgatagattaacacatataatccggaaaggaagaatatggatgcataaggaaagacaagaaaatgtccagaagattatcttagaaggcacagagagaatggaagatcagggtcagagtattattccaatgcttactggagaagtgattcctgtaatggaactgctttcatctatgaaatcacacagtgttcctgaagaaatagatatagctgatacagtactcaatgatgatgatattggtgacagctgtcatgaaggctttcttctcaatgccatcagctcacacttgcaaacctgtggctgttccgttgtagtaggtagcagtgcagagaaagtaaataagatagtcagaacattatgcctttttctgactccagcagagagaaaatgctccaggttatgtgaagcagaatcatcatttaaatatgagtcagggctctttgtacaaggcctgctaaaggattcaactggaagctttgtgctgcctttccggcaagtcatgtatgctccatatcccaccacacacatagatgtggatgtcaatactgtgaagcagatgccaccctgtcatgaacatatttataatcagcgtagatacatgagatccgagctgacagccttctggagagccacttcagaagaagacatggctcaggatacgatcatctacactgacgaaagctttactcctgatttgaacatttttcaagatgtcttacacagagacactctagtgaaagccttcctggatcaggtctttcagctgaaacctggcttatctctcagaagtactttccttgcacagtttctacttgtccttcacagaaaagccttgacactaataaaatatatagaagacgatacgcagaagggaaaaaagccctttaaatctcttcggaacctgaagatagaccttgatttaacagcagagggcgatcttaacataataatggctctggctgagaaaattaaaccaggcctacactcttttatctttggaagacctttctacactagtgtgcaagaacgagatgttctaatgactttttaaatgtgtaacttaataagcctattccatcacaatcatgatcgctggtaaagtagctcagtggtgtggggaaacgttcccctggatcatactccagaattctgctctcagcaattgcagttaagtaagttacactacagttctcacaagagcctgtgaggggatgtcaggtgcatcattacattgggtgtctcttttcctagatttatgcttttgggatacagacctatgtttacaatataataaatattattgctatcttttaaagatataataataggatgtaaacttgaccacaactactgtttttttgaaatacatgattcatggtttacatgtgtcaaggtgaaatctgagttggcttttacagatagttgactttctatcttttggcattctttggtgtgtagaattactgtaatacttctgcaatcaactgaaaactagagcctttaaatgatttcaattccacagaaagaaagtgagcttgaacataggatgagctttagaaagaaaattgatcaagcagatgtttaattggaattgattattagatcctactttgtggatttagtccctgggattcagtctgtagaaatgtctaatagttctctatagtccttgttcctggtgaaccacagttagggtgttttgtttattttattgttcttgctattgttgatattctatgtagttgagctctgtaaaaggaaattgtattttatgttttagtaattgttgccaactttttaaattaattttcattatttttgagccaaattgaaatgtgcacctcctgtgccttttttctccttagaaaatctaattacttggaacaagttcagatttcactggtcagtcattttcatcttgttttcttcttgctaagtcttaccatgtacctgctttggcaatcattgcaactctgagattataaaatgccttagagaatatactaactaataagatctttttttcagaaacagaaaatagttccttgagtacttccttcttgcatttctgcctatgtttttgaagttgttgctgtttgcctgcaataggctataaggaatagcaggagaaattttactgaagtgctgttttcctaggtgctactttggcagagctaagttatcttttgttttcttaatgcgtttggaccattttgctggctataaaataactgattaatataattctaacacaatgttgacattgtagttacacaaacacaaataaatattttatttaaaattctggaagtaatataaaagggaaaatatatttataagaaagggataaaggtaatagagcccttctgccccccacccaccaaatttacacaacaaaatgacatgttcgaatgtgaaaggtcataatagctttcccatcatgaatcagaaagatgtggacagcttgatgttttagacaaccactgaactagatgactgttgtactgtagctcagtcatttaaaaaatatataaatactaccttgtagtgtcccatactgtgttttttacatggtagattcttatttaagtgctaactggttattttctttggctggtttattgtactgttatacagaatgtaagttgtacagtgaaataagttattaaagcatgtgtaaacattgttatatatcttttctcctaaatggagaattttgaataaaatatatttgaaattttaaaaaaaaaaaaaaaaaa

SEQ ID NO: 974 - DNA, 2369 bp, Human
gatccctccctggtgccacagcagctgagtgcgcatcaaatctgaagaaaatctacacagtacagacagtacagatattttggagtgtatacaataatatccctcctgtgactagcctgcctttgagatgtagttatcatttaatgagaggagagaggcgaccactttgggaagaggagagtaatgcaaagggtggcgtatggaagatgaaagtccccaaggacagcacgtccacagtttggaaagagttgctgttagcaaccatcggggaacagttcacagactgtgccgcagcagatgatgaagtaataggagttagtgtcagtgttcgggaccgagaagacgtcgtccaagtctggaatgtaaatgcctctttagtgggtgaagcgactgttttagaaaagatctatgaacttctgccccacataacttttaaagcagtattttataaaccccatgaagagcatcatgcttttgaaggtggacgtggaaaacactaattgcactctgtaaagaattctttgtcctttgctgattggttttggaaacggtcttaacaggagggagagtgaagagaagacttgccgaagccgatgctggtcaatttagagtgggtttctgtccttgcagatgggcaattaggactcaaagtggcaggtggggtggggggagattgtgtgggtttctaccgtcacattacttgctttttaaaaaaaacacacacaaaaaactttttttttggctttctaaattctctgttcttttcactctgattttttttttttttttgccgtttaaaattccttattcagcctaattattgttttctacactcccctttcattgaggcacaagaaatgggtttccctttaagtagctctgctgtacatagttaatgagaatatgcataatcgtgacaatactgcttttgaataccacactgtacaaggaggaacactagcttggagaaatctgtcttctgattatttgttgtgacacattcctatgtactgtgagctgggcattgtttttttctgtcccggggaaaagaaaaaccatacttaatgtgattttgcactgacagcacacaaatctttaattttcctttttaaaacatttttttttagtgataaaaggaaaataatagttggattgcataacatgaaaactataatcacaattcagtatcaggatataaatcaagctataagtctttggaccctctgtggaaacatttctaacccgaattttaatttggccttttcaaccaaaggcttagagtggtagcaagggatttcttccaataggaaacctgatgtttctgatttaaagagaaggtgatattttaattgtttgaattaagctccttgcaaagttcgggtgtgtttacccacttagggctttctttcccagtcaacgctaacacattttgttaaatgatccctttccctgctcacattgtgtgtcatttctcatcatcagtagtcctccagcctgggcagctgtccccaccctttttcatgtaggtgcaggaagttaaatctcatttccaggatgcatgtgaacatttacaaagttgaactttgagtgcattctgctcatatgaattattgggattgttgatatatattgtattatgctaccaaagaaatattggttttattagaaggaaatggtcatcctctggaccatggagactagctcagaatacgctgatttccctctcctgactttgccaagcctttggctgcttttgcctgataaagggcagggccatctgaagacacttcccccagtcggctttggagtcacgggagctagtgcctgctcacacattttccaaaagggcagtgcactcagaacttcactgtacctgggatttttaattcctcttgcagtgttgaccagcagagagacttgaggctactttaagcctccactatgtgtttgtagataaaattctcaattcaaacattttaaaggactttgaacattatctgcttatggaagttgtgcccttcacttggttagtaaccacctcagccataatacttaccatcataggtttcttaaaatgctttttttttttccctaaacttgagtttccttagtgatttcaaaatgaagtataagaatatcagatccagttagcaaaagcctaggacttgtttctccaaacattgtactaacattcaacttgttttaaaattatgactcaagaattttaaaaaattattctggacatgaattaaaacttttttataatataagtatttttctgattgaaaaaaggatataattgacttcactctaattgtcatgtatatttcgataagtaaatggattttgaagtaaaaaaaaaaaaaaaa

SEQ ID NO: 975 - DNA, 3774 bp, Human
  unsure 3720: unknown base
  unsure 3724: unknown base
  unsure 3744: unknown base
  unsure 3769: unknown base
ctgatataactgcaaattaacagtaaatctctgcctaccatcctgaaagaatattcacgatatgtggtgtttttcttattctagcccagttttttctgtgaattcagatggatacggataagttgtgagaccttggggaatcattcttctctgggcctgcttcctcctctgttgtctagtctaacatccccttccaccctaggtttctatggctattctttttctacttattagaaacttgcgaatcatgctggttacagcaatttattataagctaagtaatgtaaaatatgtctaaagttgaagtactttaggcttatttccttgtctttggtgaaatacatctcaggatgcttaatttttaaattttatctttaattctaggctataccccagctttggcctgtgctcccaataaggatgtggctgattgcctggctctcattttggccaccatgatgcctgtctcatcaagtagtcctttatcatccttaacattcaatgccattaaccgttataccaacacctcaaaaacagtcagctttgaagctttgcccatcatgaggaatgaacctagctcctattgcagtttcaataacattggaggggaacaggagtacttatacactgacgtggatgagctcaacgactccgattctgagacctactgagaggctgaggaggagggagttctcacagtaaagcttcaaactgtgctttttcaggaaaaaggcactttgatattcacgtagaaattcaacctaagaggaaagatcccacagtgagccaatgttaagagatctgatggcattaggaggaagagttttaaaggcaagttttacaaaaggaacttctagaatcttgaaatagacctgactgaggaaaacacattgatgtcagaattctttgtggaattgtttaatttggttttgcagtgccaggaacaattggggacactgtgcactctaacctgcttacacaagcaacactattgtaacagaagaaataaagacactagatttaaattttatcaataaaattacaactaaatttaaaggcaataaaagtttggtacagtaggcattatgtgcacagcaaattgcaaaaggaccaaataactgaaaggtttttttaataaaatgccattttgtggaaactggagtagattaaatgaaacattacctaaaccaaactgcaatatttctggaaatgaagctgagatttggttttaaatgttgagtttttttgggttttgttttttttttaagaaaacatctgaaagccttccaatgctgtattaaaccatgagagaaagcagatgtatttttacatttttttcttttacagaactatttcaaatttccaatttttatactattagaattaaaaaccagctgactgggtgcaatacgggtgaaaatacttgtgacatagacattgagatggattggggtcaggctgttgccctgttttgaatggtttgggtttaaaatagtactatttttgtttgaaaatgtaaagaatttcctagaaaaaaattcatgaaatcaaaaagtagactatttcaccctattgcagctaagtggtcctggggcatggagtcttcaacctctctatgaatggcacaccttagtcacttatgttacttttgtgtccccaccatgggttgggggattttttgtttattctgatctatgagttttgaaaaagtgaataatcaaaaggaaaataattccttgttgttcataaattaagcatcactaaagtctcttgaaaggcatttctgtattgggcaagatttaaaatactaaagccttaggtcctattcatatttaaagtagcatgtttgtaacctgttactatttggagagagaagcagttgcctgccaaattgaagactacctttcaaatagcaaaagagagagagaaggctgatatttcggcttttaaataaagatttgtgtggttctgcttttactgtaactgtcactttcccagtgaaaatgatttcatatacattgagggtcttacaggtatgggtaaagttctataaattgcaacaaaatgatacccaatttcattttatcctttttgtattgtgaaactggaaactttatgacattgtaaattatcagctggtttttctgaatataaagtgtgaaaacacagaacagtattttgatctatttgataattttgtgggttttttgaagaattaatgagcatgtacatagaaatagtgactgcttgaatactgtatttacttgcactctttcagtacatcaagattcctgtatattttagagtataataaaacacagatgtgagttgtatttaatgaataatgtatttgtatctgtgcatattatctacaaatctataaagtttctagggcattgactactagattttaagcattttttctaaaatatttacagaaattataaatctaatcccccatcttttctttataatataaagaagtcataatgaacccttcctaattattagtagtaggaaggtgaatatgcattttaatgacagtggactacattttctattgtaccttttgaaaaaaaaaaaaatcaagcagattctaaaagtatacatatgtgtgctttctctttccttttaggaattctcttctgaattccctgagggaattttctagaatctcagaattgaaagagacctgaggttcatccagtctctaacctcttaacaaatgcaggagtcccttctacaagggtgatctttccaccttgaacacttccaagtgactctacctcaccaagcagtccattcagttgttgagcagctctaactgttagaaaggtcttccttagatggagttgaagcctccctcccggtaacttctgtctttgggcctgggtctgtcctccaagagaaccctgagaatgttggaaggatgaatctcgcacattctgccatgtcttctcttttacaggctgtttgacttctctgctgaagtgatttccagaaggactcatttgacacactattagatttaccacatctaatgaaatccaaggtgtagctataaagtgacaagctgtttttaatttatcacatacaccagaacttctatcctgcatcacttatatgtaaatgatgctgttaccaaaaacattaaggtagttcttgcgaatgccaccccactaagaaaactatttcattacttttgtaatccatctgtgagagtctgccccccagcttaaccacttcctttggtctgcacccaatgaagggaaaccccaaagtactgtctcaaatggtatttgaactacgccagtattgttggaataagtacattaattacttgaatgaatgaacacagcaccgtagaaatttcctttatggttacaccttgtatgtctaaagcattcaggccctgttctgtagtgtttcttatcctcacacagagtagaaaagcctgtttgctttatttaacttatacataaaagatgacatctgaaatatctgatgtgtattataataccagcttctgctctagaactactttgggtgaaatggtggtaatagcaaatgacctcctttaacaagacactcatctcaaacaatgccatttagttcaggagatctctaagtgtagctgtaaattttggggttaatttggcttatattggaccttttaaaagaaataaagttttttaatgcaataaatcaagtgtctgtctntttnacatgcaaacttcttttccnataaactgtctagcattgaattganaagtt

SEQ ID NO: 976 - protein, 5 aa, Human
DITAN

SEQ ID NO: 977 - DNA, 2956 bp, Human
gtattatgagaatcttataatcggaatggagtgaaatgaaacattttgagtactgatggcatgttatcatacataaagtaggtcatttaggaaaaaacttctgtccaagctttgtatgaattaaattcataagtataccaaattaaatcttaatagatttaatgcaattttacagacacaataccttcatgaatttcaaaattcatataaaatttgatcttatgcaatacacctttttgaggaggcagtgtaacaacctatagtgccattgatccatgagaaaaagattttctggtactactccaaaagtgctttgactaagtatcttaactatttgaacagtctgcttatatgagacagtttttcatagtatcatttgtataatttgattagattattcagaaacaataggatgctaaactaattcattgtatcttttttttacaatggtggaagcaactttctgaaagttcagtcttatgctacatcctaagtcatagacaatgaccttgttttcattattctgatagattgtatacatatgtacacatacatatacacatatgcacagtcaaggtcatgatgttgatttgctttcagctgtttctgtgattataaagcattttttaagagacaaattttaacttttaatttttattttggcaaaactgtcaaatgagaaaaatgattttaaaaacttttttttcaattgacaagactttaagtcagggataacagtattaatgttctctgttctgtttccatgttaaatttaatttaacctggatagccacattaatgaattggtgctgtcaaaatatagtaatttttaaatttgttaataatgaaaacccttaagcatgcaggatgaggtatttgggttttttttttagatcgatcacatctacagaaaatggctaaaccaagttaacttttattatagacagtgaataaaacaccaaaaacccaaaaatgctttaaccacagtataaataatagattatacacatcatcttaataactatttttaagttatttaccatagcctctgtatagaccttaggaacagtgtttcagtgatctggcaccagtttattttgttctgctgaaattctgtatcacaaatgtgctacctggtttttgtccattagataattactctttataaggaaaggaaagagaagcagagttagttccagctctaatagggatcttcaaagttattttgtcttgatgtatgtaacagtaattctttacatcttttgatttttctcttcctttttattcactcttcccacgaatttaaatgtttaagttatattcatcactagcaaggatgataaacacttgtgcactgaaagctaacagggagaggttacacaatattttacagtttcttaaacataatttaatgcatcaccttccacttgctaacataccaagtcagttattttcaagggaagaaccttttaaattatggtcctccatttactacttccactgagagtatgctctcattcctcaggtgttttgagaaacatgactaataaccacacaattaagtagagtcattccaagtcctatggcctggaaattgtattccctataatatacaaattttcctgtaataaagtcaacttagaaactccaaggaggttacatgttttccaacatatcctaaaaactgtgatataagctaacatataatttgccttacgtcaaaagaatatgttttgttgcagctgattccagtttataatagatccctagtaaaaagctttgattcaacacaattgttcatcttcacatcccaaacagaatcactgtttcttgaatatatatttttgaagtttttttgtgcaatatattactaaatcagttattattttacttttccaaattcagagaaagaaaacagattacctgaattcatggaaaaggtggatcacctccctttttccaccttcaagcctttcctgtcctcatagccagcatgacttcttttaacttggattcctttgtatatagtaaagtttagtatatatatatttttttctttttgctactttctgaggcattatgtaaagggctcatactagatgttcagttaaatatactttagcacaaagtcaaactagagaatgtgttaaggagggaatgtatatgtcttggtagaccaggaggcctttgccagcaatttaagcaacagatgtgaatacttcacaaagctgtaaagaccattgtcttaaatactacaacaacttaacacccttttgtgaagatcacagcatttatctaagaaactgtgaggctttctggtttacatatatcttacaggtgtttttttgtattttttttttttagtttgaaatgtgtaagctttgatttaaaccaagtttacttcagtatgttaatgatgtagtaaaaatatttattgaaaggtgaattcgagtattttaatgttatacctgccattttttttcttaaagcatattctttgcatctaactgccagtgccattgtcaaaacttattttttaaatcgttgtacatttcttattaaactaagtgcttaattttaaagtattatgttgccatcatatagtgtataaaaatgtataattgccaattgattgtaactattatttatttttaaatgaaagtgtaagaatgctttctgattcaacaaatttgttatcaaactgtttccttatcctcttttctgatgtagcataaaaattgtcccggtttgagttataactgccagtagatgaccagtcacaagtgaaccacttctcagttgccaatctttgctcatattaaaaacaacttacaaatacttagtttttgtatctaatctctgattattaaaatgtttataaagtttatttttaccaaagagatgcaattcattatgagaaagtattgcataataaattttgttttataactttaaa

SEQ ID NO: 978 - DNA, 2110 bp, Human
gaaaaaaaaaaaaaaaggataccttcatttctgactcaatatcctagaatccaaaggacaggaaattagggaaggcttcaccctgtgggatcaagataagaagatcccatacttcttcccaggtaaggaggcctgtggcaggtcatgattcaaagctgacttggaatggcagaaactgctgagaggccacccttggagatttgtgccttcaaagatgggtttcatgagtctcagagaggaaaagacttgtcagctgggttgattttgcatgattattgaactagagctggtagacacgagcttctcagatggcagtggccagatcctccatctgtgagaatccgccacttgaagtggtttcctgagagtgttcacttggcagttgctgcgtttctcaagcccacctggcgaggtctcgccggacccttccctccaagtgcacttacttcttcatccccatgtacatctctaactttgaaattgtttacctctcctacaaaaatcttaccttttgacctgagcagagtagcaaagccctgttcactctgagggagcagctggcgtgttgaaggggaaaggccaggcacagcactgtcctcagaccacaccatatttggagcagaattgtgatacatgtcatctgtgtctattctggaaggttctttgttcatcactgtactcgcatcagcaaattttcagggtcctacctgtcactccaggctactgagctgaaccctcagaagctgaggtctccgagcatgctaagtaaccttttagaaaagctggaggcaaactgtcgaatgctagcaggctttatgaaaggaaacataaggagtttgtgtagtcagaacttgcttaaatttgcttcggaattaggcaccataaactttagttggagaatgggacttaaattttcacatatatgtatacttaattttcagcaattatgacacaataaaaagaatatgcaaatttattgttgtttcagaaggttttgcaggactgggaacgctttagtgtcatcaacagtaaacctcagatactgttctgcacagttcagaagtaccataccaggtattgtgagtggcaagaacgccaggagacagagatgcttctggtagatgagggccagagaaaccagctctcctccattttgacagcaatttctcactgtggccatttggcctccattatgttttgagaggaatttcttgagatcttgagaaatcaccatgattaggccaattgtcaatcagtattcagaaactagaaaggaacaatgagatacttgtttatggttctttagggcatatgtttgaaaaccctctcatctcagatctgtatagctggtgtgtgtttgtgtccataaatacacgtgcattgctgtcgtgcccattaagaaagggggagtaagtaaaagaggaatcgctcagatctttccttggatgaacagcagtggcgtggttggtgtgttgactgtgaacaggctgacttagctgttgatgtatactcagaacctccatctcctcccagaccctgcacttttccttctctgcagtctgattctctaatgactgtcactggacaaaccccagttttatgctcgcttagtaaaaataagtttaaacatttcatggtggttgacagaactttgtccccaaacatgcggattcaattccttaaaactcgttgaacgtttataccaaaggtcccgccccgcaggtgtgtatgtggtgcacagagggtgaggtttggagcatcgggcactgtgtgcattgctaaggggacatagtgagacaatgtgggatttaactaaaaacacatcaattgtgtgtcacattaccagtgttgtcaggtatttgttcttaattgttattgtaatatattttcagttgtttttctaatttaattctctccgtctgttgtctgactgtgaactgctaacagtgttaaacttgatgtaaataaatgaggcccttgaaagggactgctttctctgtcttctcacaaggtttgccaagttgtgttctgttttaaataaaggttgcaatattttattggcaaaaaaaatctatgtcgggtgcggagaaagaggtaatgaaatggcagg

SEQ ID NO: 979 - DNA, 6078 bp, Human
  unsure 2048: unknown base
  unsure 2049: unknown base
  unsure 2050: unknown base
  unsure 2051: unknown base
  unsure 2052: unknown base
  unsure 2053: unknown base
  unsure 2054: unknown base
  unsure 2055: unknown base
  unsure 2056: unknown base
  unsure 2057: unknown base
  unsure 2058: unknown base
  unsure 2059: unknown base
  unsure 2060: unknown base
  unsure 2061: unknown base
  unsure 2062: unknown base
  unsure 2063: unknown base
  unsure 2064: unknown base
  unsure 2065: unknown base
  unsure 2066: unknown base
  unsure 2067: unknown base
  unsure 2068: unknown base
  unsure 2069: unknown base
  unsure 2070: unknown base
  unsure 2071: unknown base
  unsure 2072: unknown base
  unsure 2073: unknown base
  unsure 2074: unknown base
  unsure 2075: unknown base
  unsure 2076: unknown base
  unsure 2077: unknown base
  unsure 2078: unknown base
  unsure 2079: unknown base
  unsure 2080: unknown base
  unsure 2081: unknown base
  unsure 2082: unknown base
  unsure 2083: unknown base
  unsure 2084: unknown base
  unsure 2085: unknown base
  unsure 2086: unknown base
  unsure 2087: unknown base
  unsure 2637: unknown base
  unsure 2638: unknown base
  unsure 2639: unknown base
  unsure 2640: unknown base
  unsure 2641: unknown base
  unsure 2642: unknown base
  unsure 2643: unknown base
  unsure 2644: unknown base
  unsure 2645: unknown base
  unsure 2646: unknown base
  unsure 2647: unknown base
  unsure 2648: unknown base
  unsure 2649: unknown base
  unsure 2650: unknown base
  unsure 2651: unknown base
  unsure 2652: unknown base
  unsure 2653: unknown base
  unsure 2654: unknown base
  unsure 2655: unknown base
  unsure 2656: unknown base
  unsure 2657: unknown base
  unsure 2658: unknown base
  unsure 2659: unknown base
  unsure 2660: unknown base
  unsure 5679: unknown base
cggagacagtcagaactctcctccctgacagccacaaacctacagcactgactgcattcagagaggaacctgcaaacaaaacttcacagaaaactttttgttcttgttccagagaatttgctgaagaggagaaggaaaaaaaaaacaccacaaaaaaaaataaaaaaatccacacacacaaaaaaacctgcgcgtgaggggggaggaaaagcagggccttttaaaaaggcaatcacaacaacttttgctgccaggatgcccttgctttgggctgagaggatttctgttggcaagttgctggattatagtgaggagttcccccaccccaggatccgaggggcacagcgcggcccccgactgtccgtcctgtgcgctggccgccctcccaaaggatgtacccaactctcagccagagatggtggaggccgtcaagaagcacattttaaacatgctgcacttgaagaagagacccgatgtcacccagccggtacccaaggcggcgcttctgaacgcgatcagaaagcttcatgtgggcaaagtcggggagaacgggtatgtggagatagaggatgacattggaaggagggcagaaatgaatgaacttatggagcagacctcggagatcatcacgtttgccgagtcaggaacagccaggaagacgctgcacttcgagatttccaaggaaggcagtgacctgtcagtggtggagcgtgcagaagtctggctcttcctaaaagtccccaaggccaacaggaccaggaccaaagtcaccatccgcctcttccagcagcagaagcacccgcagggcagcttggacacaggggaagaggccgaggaagtgggcttaaagggggagaggagtgaactgttgctctctgaaaaagtagtagacgctcggaagagcacctggcatgtcttccctgtctccagcagcatccagcggttgctggaccagggcaagagctccctggacgttcggattgcctgtgagcagtgccaggagagtggcgccagcttggttctcctgggcaagaagaagaagaaagaagaggagggggaagggaaaaagaagggcggaggtgaaggtggggcaggagcagatgaggaaaaggagcagtcgcacagacctttcctcatgctgcaggcccggcagtctgaagaccaccctcatcgccggcgtcggcggggcttggagtgtgatggcaaggtcaacatctgctgtaagaaacagttctttgtcagtttcaaggacatcggctggaatgactggatcattgctccctctggctatcatgccaactactgcgagggtgagtgcccgagccatatagcaggcacgtccgggtcctcactgtccttccactcaacagtcatcaaccactaccgcatgcggggccatagcccctttgccaacctcaaatcgtgctgtgtgcccaccaagctgagacccatgtccatgttgtactatgatgatggtcaaaacatcatcaaaaaggacattcagaacatgatcgtggaggagtgtgggtgctcatagagttgcccagcccagggggaaagggagcaagagttgtccagagaagacagtggcaaaatgaagaaatttttaaggtttctgagttaaccagaaaaatagaaattaaaaacaaacccaaaaaaaaacacaaaaaaaaacaaaagtaaattaaaaacaaaacctgatgaaacagatgaaggaagatgtggaaaaaatccttagccagggctcagagatgaagcagtgaaagagacaggaattgggagggaaagggagaatggtgtaccctttatttcttctgaaatcacactgatgacatcagttgtttaaacggggtattgtcctttccccccttgaggttcccttgtgagccttgaatcaaccaatctagtctgcagtagtgtggactagaacaacccaaatagcatctagaaagccatgagtttgaaagggcccatcacaggcactttcctacccaattacccaggtcataaggtatgtctgtgtgacacttatctctgtgtatatcagnnnnnnnnnnnnnnnnnnnnnnnnnnnnnnnnnnnnnnnntttccacacattacatatatacacatactggtaaaagaacaatcgtgtgcaggtggtcacacttcctttttctgtaccacttttgcaacaaaacaaaacaaacaacattaaaaaattgagaacaagtatggaaagaatgaaagatcaaggaaaaaagaataccaagttacatttcgttaaggtgcttatgatcttagaactatgcaacctaataggtttgaaactgtttacctgagagagaacaaaaagagagacttttttgtattggaagtaatctgattaatttttattttcttcaaggagagatacttgaaaggaatatgtttgtccatctgttggatccaaacatttctatatttagtaaagttgtgtcgtagttctttattgtaaatgcgtttactatttgcactacaatggtgtttgacctgtctaatccttatttaacaagtattttctttggttgggggtgggggtggggtttaagagctgcacttaatgtgagctataaaagaactgctacagcacacaaaatagctatttttattattannnnnnnnnnnnnnnnnnnnnnnngtaccttaaaaaatagacacatacaccaaagacatttgtgtgagcctttaaacagtctgtctgtggttggtatcattcaccatcaatgagtcaggggttgggattcaaggttgagtagtgtggattgtgttcaggcttaaaagacctgagaagtttggtttttgactccttttacatccatgaaacaggacatttcatactggatgtacagtagttgtacactgttggatatcaagttcaatcaaattcatggaactacatgcttgtatgtgtatatatacattgcttgtgcatatgcatatctgtatgtatatatacatgtattgtaccatgtccatacacattttaagcacttcaggctgtcattttttaatgttcttaaagcaatgaatgtttgtgtgcaaaacacagtatttttaagaaggataggctatagtttttgcttttactctgaactaggtgggcgcatttcaaaaattcggatgggaaaaagcctggaaattccagtgaatattcagcaaggccctctttcattgtacagggatcaaatttcctcctcttttttgtgccccctcccacttctacaagttatcccctgtggggaaaacaggatgataatcaaaactctgggctgatgtttttccaacttagtgtctattggaatcaatcttaaatcagaagctttttcagaaaaataatatttaggccagaattagagttgagtgtattttttaaaaatgattaaggcttggttgtgagaaatattacctgtaccagctgggaaaaataatgtcatcactaactaaaagataattaatttgagagaaagtgttaagagagggagagtaaggaagagaacagttaagaggaggcagaggtgagggcagtagtaaaaatctctaaaattttaatttacagccaaaattcttcatgtgtaaatttgtattgattcagatgcagaaatgaaaaaaaaacacctttgttttataaatatcaaagtacatgcttaaagccaagtttttatctagtttattctagtacttagcttgcctggaatagctaataaattattcatgtatgtgcttttgaaaatccagagccctatttttacacacttgtgtgaagttggcaaacattttgaaaaatggaaaaaagtttctaataattgggaacaattacattaattaatattttgtaaaatattgaagcttttagccctatgtcaatttgtagattaaaataaattaattataggaaaggaagataacagtgagaaaccaaacattacaaaaggtggtttagctctccttgaaaaatatactaagttggtatactataacacttggctatatgtaggcaatgtcactactgggcaaatacacttactgtgttctagaggcagccctttcttatgcagaaaatacaatacgcactgcatgagaagcttgagagtggattctaatccaggtctgtcgaccttggatatcatgcatgtgggaaggtgggtgtggtgagaaaagttttaaggcaagagtagatggccatgttcaactttacaaaatttcttggaaaactggcagtattttgaactgcatcttctttggtaccggaacctgcagaaacagtgtgagaaattaagtcctggttcactgcgcagtagcaaagatggtcaaggccatggaaaaagcagaaatttaccaagaaagctgatacccatgtatagttcccactcatctcaaatacatctgctatctttttaagctaagtcctagacatatcggggataacatgggggttgattagtgaccacagttatcagaagcagagaaatgtaattccatattttatttgaaacttattccatattttaattggatattgagtgattgggttatcaaacacccacaaactttaattttgttaaatttatatggctttgaaatagaagtataagttgctaccattttttgataacattgaaagatagtattttaccatctttaatcatcttggaaaatacaagtcctgtgaacaaccactctttcacctagcagcatgaggccaaaagtaaaggctttaaattataacatatgggattcttagtagtatgtttttttcttgaaactcagtggctctatctaaccttactatctcctcactctttctctaagactaaactctaggctcttaaaaatctgcccacaccaatcttagaagctctgaaaagaatttgtctttaaatatcttttaatagtaacatgtattttatggaccaaattgacattttcgactattttttccaaaaaagtcaggtgaatttcagcacactgagttgggaatttcttatcccagaagaccaaccaatttcatatttatttaagattgattccatactccgttttcaaggagaatccctgcagtctccttaaaggtagaacaaatactttctatttttttttcaccattgtgggattggactttaagaggtgactctaaaaaaacagagaacaaatatgtctcagttgtattaagcacggacccatattatcatattcacttaaaaaaatgatttcctgtgcaccttttggcaacttctcttttcaatgtagggaaaaacttagtcaccctgaaaacccacaaaataaataaaacttgtagatgtgggcagaaggtttgggggtggacattgtatgtgtttaaattaaaccctgtatcactgagaagctgttgtatgggtcagagaaaatgaatgcttagaagctgttcacatcttcaagagcagaagcaaaccacatgtctcagctatattattatttattttttatgcataaagtgaatcatttcttctgtattaatttccaaagggttttaccctctatttaaatgctttgaaaaacagtgcattgacaatgggttgatatttttctttaaaagaaaaatataattatgaaagccaagataatctgaagcctgttttattttaaaactttttatgttctgtggttgatgttgtttgttngtttgtttctattttgttggttttttactttgttttttgttttgttttgttttgttttgcatactacatgcagttctttaaccaatgtctgtttggctaatgtaattaaagttgttaatttatatgagtgcatttcaactatgtcaatggtttcttaatatttattgtgtagaagtactggtaatttttttatttacaatatgtttaaagagataacagtttgatatgttttcatgtgtttatagcagaagttatttatttctatggcattccagcggatattttggtgtttgcgaggcatgcagtcaatattttgtacagttagtggacagtattcagcaacgcctgatagcttctttggccttatgttaaataaaaagacctgtttgggatgtaaaa

SEQ ID NO: 980 - DNA, 415 bp, Human
  unsure 49: unknown base
  unsure 51: unknown base
  unsure 52: unknown base
  unsure 53: unknown base
  unsure 54: unknown base
  unsure 55: unknown base
  unsure 57: unknown base
  unsure 59: unknown base
  unsure 60: unknown base
  unsure 61: unknown base
  unsure 64: unknown base
  unsure 65: unknown base
  unsure 66: unknown base
  unsure 67: unknown base
  unsure 71: unknown base
  unsure 76: unknown base
tatccttgttatcctcgtagtgtgccaagtcagaggctttctcttgccntnnnnntncnnntgnnnncttnctagnccctatttggggagggtggctggaaacagatttttgctgaatttctggctcagatcttctagccaggaaaggcaagagcccccaagagcccttttttttgacatacactaatcattggccggggtcttggtgacaacttttaaaatcccaaatagttttatttggattatgtaaaagtaagtgtgaaacatgggaacaacggacttccactgagcgatgtgaaaacgttacaggttcagtacttccaaaggaagaaacctccaaacccaaaaaagaataaatatgaatttgtatttttgaagaatgtgaaataatggtgtttgcttaattgctcatttt

SEQ ID NO: 981 - DNA, 3878 bp, Human
ttgtctgttgggggcgtgcgcagtcgggatggaagcttcctggcgccaggtggccggtggccgaggccgatcccggggacgggccactgccgccccctcaggaaatggagtccatctccgcggcgccggaggagggcgagagaaggggtcggtgggcgcagttccttctggcaccagtcccggaggagtcgcgaccacggcggctgcagggagcaggcacagccccgcaggatcccaagccctgcagactaccgcagccagcgagctaatgtctcagaaaaaatttgaagaaatcaagaaagctaaccaagctgcagccagaaaacttgttgaagaacagtttagctcttcatctgaagaaggagatgaagattttgaaggaaaacagggaaaaatacttgcaaatacgtttataacatacactactcagacagatggagatacacgtgaattagagcgaacaaaacaatatgtaaatgaagcttttcaagcaggggctatgacatgcctaatttgtattgcttcggtgaagagaaaccaagcagtttggagctgttcgggatgtttctgtatatttcacatgccctgtatccagaagtgggctaaagacagccagtttcttgtatcttctgtgactgatgatgattttggaaagaaagattgtccctggccttgtccaaaatgtaggtttgaatacaaacgatctgaaacacctagtaggtactattgctattgtggaaaagtagaagatccacctttagatccgtggcttgtgcctcattcatgtggccaagtatgtgagcgtgaatttaaacctccttgtggccataaatgtttactcctctgtcatccaggtccctgccctccttgtccaaagatggtcacaactacttgttactgtaagaaagcaaaacctatccctcgtaggtgcagtgccaaggaatggtcttgtcagctgccatgtggacagaagttgctttgtgggcaacataagtgtgaaaatccttgtcatgcaggaagctgtcagccttgtccaagagttagtagacaaaagtgtgtctgtggcaaaaaagtagctgaaagaagttgtgcaagtccactatggcactgtgatcaagtatgtggaaaaacactgccatgtggtaatcacacatgtgagcaagtttgccatgttggtgcttgtggagaatgtcctcgatctgggaaaaggttctgtccatgtcagaaatcaaagttttctttgccttgtacagaagatgtaccaacttgtggagacagttgtgacaaagtacttgaatgcggaatccatagatgttcacagcgttgtcaccgaggtccctgtgaaacatgtagacaagaagtggaaaagcattgtcgctgtggaaagcatacaaaacgaatgccttgtcataaaccttatctgtgtgaaactaagtgtgttaagatgcgtgactgtcagaagcatcaatgtagaagaaagtgttgccctggaaactgtccaccttgtgatcaaaactgtggacggactttaggatgtagaaaccataagtgtccatctgtctgtcacagaggcagttgctatccctgcccagaaactgtagatgtgaagtgtaattgtggcaatacaaaggtgacagtgccctgtggccgagaacgtaccacaagaccacccaagtgcaaggagcaatgcagtcgaccaccaacttgtcatcatacaagtcaagaaaaacatcgctgtcactttggttcttgtccaccatgtcatcaaccttgccaaaaagttttggagaaatgtggtcacttgtgtcctgctccgtgtcatgatcaagcgttaataaagcagactggcaggcaccagcctacaggcccttgggaacagccttctgagccagcatttattcagactgcattaccgtgtcctccatgtcaagttcctattcctatggaatgtcttgggaaacatgaggtgagtccactaccatgccatgctgtaggaccctactcttgtaaaagagtttgtggaagaatcttggattgtcagaatcacacatgtatgaaagaatgccacaaagtaaccaaaactgatggctgcactggaaaaaacaagatagggaaactgaagctctgtgatttgtccatgattctgcaacaggagagtagcaaatcagaaagtactgtgcctgatcttttaactcccagcccaatgtgctcttctactcatgttatttaaatagaagatttttgtaggtgtaccacataggaagagcaaatgaaataaactctttaggctggcccagaatgccttcattgtgaggaagggtgctccaagtcacggccactaggttgtcttcacccatgtattttgcgatgtcaccctggagaatgtccaccttgtgttcagatgcttagaataaaatgtcactgtaagatcacaagcctgtatgtggaatgtagaaaaataaccacagctgatgtaaatgaaaagaacctcctcagttgttgcaaaaatcagtgccctaaagagcttccttgtggtcatagatgcaaagagatgtgtcatcctggtgaatgtccctttaactgcaaccagaaggtaaaacttagatgtccttgtaaaagaataaaaaaggaattgcagtgcaacaaagtacgtgaaaatcaggtttcaatagaatgtgacacaacgtgcaaggaaatgaagcggaaagcatctgagataaaagaagcagaagccaaagctgctcttgaagaagaaaaacgaagacaacaggctgaactagaagcttttgaaaacagactgaagggtcgtcggaagaagaacaggaaaagagatgaagtggcagttgagctatcactatggcaaaaacataaatattatctcatttcagtgtgtggagttgtggttgtagtgtttgcctggtacatcacccatgatgtcaattaaaaaaagttttgatcttttaatgtaactcagattggatttagataagttgttaaatttgaaatattagaaaatgtatattatagaacatgatatatatttacattcatctctgtattctctcagctgttgttagaaggacagaatgttaaactttatcttaattagtatactagaaagggcagtatactactgtttaaagtgaaggcatgactgaaactaaaatatttcataaggcttagctagaggcagagtaacgtgtttttgttcattgggcttccttgtacttagttttttcatttaataattcaaaccaacacttttaaaaaaataattcagatgagactgagccatatctgcagtaagagaaatatttcttaatgttttggttacttatgatagagtacttttcttgttactgttaactttgtgctttttaaaaaaagtgattctctaacagacctcttaaattgtgacatgaaggtatgtaattagatttcagaaattggtttattagtgaggaatttttatcaataaatgtcatggggcgtgttcttcagaatatatagttattttcaacaaatgccaggctagattcctcacatgtggctatttcttatgtaagaagcttttaactgaagttggcatgtttcgtaaaacttgcgtgtcttttaaaaataataaaaggaagatgagtatttatgaagaatatgtgctgacaacagggcttatgaggtctatgtaccttaatctcgtttctccttaccacaatcttaaatagatttcagctgaaaataatcagttcttatgaaaacaaatagagaaatatcagtaagtcaaatctgtttgaattataattcctttcaaatagttttgctatttaatttatatgattaatgttttcattaaaatttttgataccaaaaaaaaaaaaaaa

SEQ ID NO: 982 - protein, 733 aa, Human
MEASWRQVAGGRGRSRGRATAAPSGNGVHLRGAGGGREKGSVGAVPSGTSPGGVATTAAAGSRHSPAGSQALQTTAASELMSQKKFEEIKKANQAAARKLVEEQFSSSSEEGDEDFEGKQGKILANTFITYTTQTDGDTRELERTKQYVNEAFQAGAMTCLICIASVKRNQAVWSCSGCFCIFHMPCIQKWAKDSQFLVSSVTDDDFGKKDCPWPCPKCRFEYKRSETPSRYYCYCGKVEDPPLDPWLVPHSCGQVCEREFKPPCGHKCLLLCHPGPCPPCPKMVTTTCYCKKAKPIPRRCSAKEWSCQLPCGQKLLCGQHKCENPCHAGSCQPCPRVSRQKCVCGKKVAERSCASPLWHCDQVCGKTLPCGNHTCEQVCHVGACGECPRSGKRFCPCQKSKFSLPCTEDVPTCGDSCDKVLECGIHRCSQRCHRGPCETCRQEVEKHCRCGKHTKRMPCHKPYLCETKCVKMRDCQKHQCRRKCCPGNCPPCDQNCGRTLGCRNHKCPSVCHRGSCYPCPETVDVKCNCGNTKVTVPCGRERTTRPPKCKEQCSRPPTCHHTSQEKHRCHFGSCPPCHQPCQKVLEKCGHLCPAPCHDQALIKQTGRHQPTGPWEQPSEPAFIQTALPCPPCQVPIPMECLGKHEVSPLPCHAVGPYSCKRVCGRILDCQNHTCMKECHKVTKTDGCTGKNKIGKLKLCDLSMILQQESSKSESTVPDLLTPSPMCSSTHVI

SEQ ID NO: 983 - DNA, 3641 bp, Human
  unsure 2224: unknown base
  unsure 2225: unknown base
  unsure 2226: unknown base
  unsure 2227: unknown base
  unsure 2228: unknown base
  unsure 2229: unknown base
  unsure 2230: unknown base
  unsure 2231: unknown base
  unsure 2232: unknown base
  unsure 2233: unknown base
  unsure 2234: unknown base
  unsure 2235: unknown base
  unsure 2236: unknown base
  unsure 2237: unknown base
  unsure 2238: unknown base
  unsure 2239: unknown base
  unsure 2240: unknown base
  unsure 2241: unknown base
  unsure 2242: unknown base
  unsure 2243: unknown base
  unsure 2244: unknown base
  unsure 2245: unknown base
  unsure 2246: unknown base
  unsure 2247: unknown base
  unsure 2248: unknown base
  unsure 2249: unknown base
  unsure 2250: unknown base
  unsure 2251: unknown base
  unsure 2252: unknown base
  unsure 2253: unknown base
  unsure 2254: unknown base
  unsure 2255: unknown base
  unsure 2256: unknown base
  unsure 2257: unknown base
  unsure 2258: unknown base
  unsure 2259: unknown base
  unsure 2260: unknown base
  unsure 2261: unknown base
  unsure 2262: unknown base
  unsure 2263: unknown base
  unsure 2264: unknown base
  unsure 2265: unknown base
  unsure 2266: unknown base
  unsure 2267: unknown base
  unsure 2268: unknown base
  unsure 2269: unknown base
  unsure 2270: unknown base
  unsure 2271: unknown base
  unsure 2272: unknown base
  unsure 2273: unknown base
  unsure 2274: unknown base
  unsure 2275: unknown base
  unsure 2276: unknown base
  unsure 2277: unknown base
  unsure 2278: unknown base
  unsure 2279: unknown base
  unsure 2280: unknown base
  unsure 2281: unknown base
  unsure 2282: unknown base
  unsure 2283: unknown base
  unsure 2284: unknown base
  unsure 2285: unknown base
  unsure 2286: unknown base
  unsure 2287: unknown base
  unsure 2288: unknown base
  unsure 2289: unknown base
  unsure 2290: unknown base
  unsure 2291: unknown base
  unsure 2292: unknown base
  unsure 2293: unknown base
  unsure 2294: unknown base
  unsure 2295: unknown base
  unsure 2296: unknown base
  unsure 2297: unknown base
  unsure 2298: unknown base
  unsure 2299: unknown base
  unsure 2300: unknown base
  unsure 2301: unknown base
  unsure 2302: unknown base
  unsure 2303: unknown base
  unsure 2304: unknown base
  unsure 2305: unknown base
  unsure 2306: unknown base
  unsure 2307: unknown base
  unsure 2308: unknown base
  unsure 2309: unknown base
  unsure 2310: unknown base
  unsure 2311: unknown base
  unsure 2312: unknown base
  unsure 2313: unknown base
  unsure 2314: unknown base
  unsure 2315: unknown base
  unsure 2316: unknown base
  unsure 2317: unknown base
  unsure 2318: unknown base
  unsure 2319: unknown base
  unsure 2320: unknown base
  unsure 2321: unknown base
  unsure 2322: unknown base
  unsure 2323: unknown base
  unsure 2324: unknown base
  unsure 2325: unknown base
  unsure 2326: unknown base
  unsure 2327: unknown base
  unsure 2328: unknown base
  unsure 2329: unknown base
  unsure 2330: unknown base
  unsure 2331: unknown base
  unsure 2332: unknown base
  unsure 2333: unknown base
  unsure 2334: unknown base
  unsure 2335: unknown base
  unsure 2336: unknown base
  unsure 2337: unknown base
  unsure 2338: unknown base
  unsure 2339: unknown base
  unsure 2340: unknown base
  unsure 2341: unknown base
  unsure 2342: unknown base
  unsure 2343: unknown base
  unsure 2344: unknown base
  unsure 2345: unknown base
  unsure 2346: unknown base
  unsure 2347: unknown base
  unsure 2348: unknown base
  unsure 2349: unknown base
  unsure 2350: unknown base
  unsure 2351: unknown base
  unsure 2352: unknown base
  unsure 2353: unknown base
  unsure 2354: unknown base
  unsure 2355: unknown base
  unsure 2356: unknown base
  unsure 2357: unknown base
  unsure 2358: unknown base
  unsure 2359: unknown base
  unsure 2360: unknown base
  unsure 2361: unknown base
  unsure 2362: unknown base
  unsure 2363: unknown base
  unsure 2364: unknown base
  unsure 2365: unknown base
  unsure 2366: unknown base
  unsure 2367: unknown base
  unsure 2368: unknown base
  unsure 2369: unknown base
  unsure 2370: unknown base
  unsure 2371: unknown base
  unsure 2372: unknown base
  unsure 2373: unknown base
  unsure 2374: unknown base
  unsure 2375: unknown base
  unsure 2376: unknown base
  unsure 2377: unknown base
  unsure 2378: unknown base
  unsure 2379: unknown base
  unsure 2380: unknown base
  unsure 2381: unknown base
  unsure 2382: unknown base
  unsure 2383: unknown base
  unsure 2384: unknown base
  unsure 2385: unknown base
  unsure 2386: unknown base
  unsure 2387: unknown base
  unsure 2388: unknown base
  unsure 2389: unknown base
  unsure 2390: unknown base
  unsure 2391: unknown base
  unsure 2392: unknown base
  unsure 2393: unknown base
  unsure 2394: unknown base
  unsure 2395: unknown base
  unsure 2396: unknown base
  unsure 2397: unknown base
  unsure 2398: unknown base
  unsure 2399: unknown base
  unsure 2400: unknown base
  unsure 2401: unknown base
  unsure 2402: unknown base
  unsure 2403: unknown base
  unsure 2404: unknown base
  unsure 2405: unknown base
  unsure 2406: unknown base
  unsure 2407: unknown base
  unsure 2408: unknown base
  unsure 2409: unknown base
  unsure 2410: unknown base
  unsure 2411: unknown base
  unsure 2412: unknown base
  unsure 2413: unknown base
  unsure 2414: unknown base
  unsure 2415: unknown base
  unsure 2416: unknown base
  unsure 2417: unknown base
  unsure 2418: unknown base
  unsure 2419: unknown base
  unsure 2420: unknown base
  unsure 2421: unknown base
  unsure 2422: unknown base
  unsure 2423: unknown base
  unsure 2424: unknown base
  unsure 2425: unknown base
  unsure 2426: unknown base
  unsure 2427: unknown base
  unsure 2428: unknown base
  unsure 2429: unknown base
  unsure 2430: unknown base
  unsure 2431: unknown base
  unsure 2432: unknown base
  unsure 2433: unknown base
  unsure 2434: unknown base
  unsure 2435: unknown base
  unsure 2436: unknown base
  unsure 2437: unknown base
  unsure 2438: unknown base
  unsure 2501: unknown base
  unsure 2502: unknown base
  unsure 2503: unknown base
  unsure 2504: unknown base
  unsure 2505: unknown base
  unsure 2506: unknown base
  unsure 2507: unknown base
  unsure 2508: unknown base
  unsure 2509: unknown base
  unsure 2510: unknown base
  unsure 2511: unknown base
  unsure 2512: unknown base
  unsure 2513: unknown base
  unsure 2514: unknown base
  unsure 2515: unknown base
  unsure 2516: unknown base
  unsure 2517: unknown base
  unsure 2518: unknown base
  unsure 2519: unknown base
  unsure 2520: unknown base
  unsure 2521: unknown base
  unsure 2522: unknown base
  unsure 2523: unknown base
  unsure 2524: unknown base
  unsure 2525: unknown base
  unsure 2526: unknown base
  unsure 2527: unknown base
  unsure 2528: unknown base
  unsure 2529: unknown base
  unsure 2530: unknown base
  unsure 2531: unknown base
  unsure 2532: unknown base
  unsure 2533: unknown base
  unsure 2534: unknown base
  unsure 2535: unknown base
  unsure 2536: unknown base
  unsure 2537: unknown base
  unsure 2538: unknown base
  unsure 2539: unknown base
  unsure 2540: unknown base
  unsure 2541: unknown base
  unsure 2542: unknown base
  unsure 2543: unknown base
  unsure 2544: unknown base
  unsure 2545: unknown base
  unsure 2546: unknown base
  unsure 2547: unknown base
  unsure 2548: unknown base
  unsure 2549: unknown base
  unsure 2550: unknown base
  unsure 2551: unknown base
  unsure 2552: unknown base
  unsure 2553: unknown base
  unsure 2554: unknown base
  unsure 2555: unknown base
  unsure 2556: unknown base
  unsure 2557: unknown base
  unsure 2558: unknown base
  unsure 2559: unknown base
  unsure 2560: unknown base
  unsure 2561: unknown base
  unsure 2562: unknown base
  unsure 2563: unknown base
  unsure 2564: unknown base
  unsure 2565: unknown base
  unsure 2566: unknown base
  unsure 2567: unknown base
  unsure 2568: unknown base
  unsure 2569: unknown base
  unsure 2570: unknown base
  unsure 2571: unknown base
  unsure 2572: unknown base
  unsure 2573: unknown base
  unsure 2574: unknown base
  unsure 2575: unknown base
  unsure 2576: unknown base
  unsure 2577: unknown base
  unsure 2578: unknown base
  unsure 2579: unknown base
  unsure 2580: unknown base
  unsure 2581: unknown base
  unsure 2582: unknown base
  unsure 2583: unknown base
  unsure 2584: unknown base
  unsure 2585: unknown base
  unsure 2586: unknown base
  unsure 2587: unknown base
  unsure 2588: unknown base
  unsure 2589: unknown base
  unsure 2590: unknown base
  unsure 2591: unknown base
  unsure 2592: unknown base
  unsure 2593: unknown base
  unsure 2594: unknown base
  unsure 2595: unknown base
  unsure 2596: unknown base
  unsure 2597: unknown base
  unsure 2598: unknown base
  unsure 2599: unknown base
  unsure 2600: unknown base
  unsure 2601: unknown base
  unsure 2602: unknown base
  unsure 2603: unknown base
  unsure 2604: unknown base
  unsure 2605: unknown base
  unsure 2606: unknown base
  unsure 2607: unknown base
  unsure 2608: unknown base
  unsure 2609: unknown base
  unsure 2610: unknown base
  unsure 2611: unknown base
  unsure 2612: unknown base
  unsure 2613: unknown base
  unsure 2614: unknown base
  unsure 2615: unknown base
  unsure 2616: unknown base
  unsure 2617: unknown base
  unsure 2618: unknown base
  unsure 2619: unknown base
  unsure 2620: unknown base
  unsure 2621: unknown base
  unsure 2622: unknown base
  unsure 2623: unknown base
  unsure 2624: unknown base
  unsure 2625: unknown base
  unsure 2626: unknown base
  unsure 2627: unknown base
  unsure 2628: unknown base
  unsure 2629: unknown base
  unsure 2630: unknown base
  unsure 2631: unknown base
  unsure 2632: unknown base
  unsure 2633: unknown base
  unsure 2634: unknown base
  unsure 2635: unknown base
  unsure 2636: unknown base
  unsure 2637: unknown base
  unsure 2638: unknown base
  unsure 2639: unknown base
  unsure 2640: unknown base
  unsure 2641: unknown base
  unsure 2642: unknown base
  unsure 2643: unknown base
  unsure 2644: unknown base
  unsure 2645: unknown base
  unsure 2646: unknown base
  unsure 2647: unknown base
  unsure 2648: unknown base
  unsure 2649: unknown base
  unsure 2650: unknown base
  unsure 2651: unknown base
  unsure 2652: unknown base
  unsure 2653: unknown base
  unsure 2654: unknown base
  unsure 2655: unknown base
  unsure 2656: unknown base
  unsure 2657: unknown base
  unsure 2658: unknown base
  unsure 2659: unknown base
  unsure 2660: unknown base
  unsure 2661: unknown base
  unsure 2662: unknown base
  unsure 2663: unknown base
  unsure 2664: unknown base
  unsure 2665: unknown base
  unsure 2666: unknown base
  unsure 2667: unknown base
  unsure 2668: unknown base
  unsure 2669: unknown base
  unsure 2670: unknown base
  unsure 2671: unknown base
  unsure 2672: unknown base
  unsure 2673: unknown base
  unsure 2674: unknown base
  unsure 2675: unknown base
  unsure 2676: unknown base
  unsure 2677: unknown base
  unsure 2678: unknown base
  unsure 2679: unknown base
  unsure 2680: unknown base
  unsure 2681: unknown base
  unsure 2682: unknown base
  unsure 2683: unknown base
  unsure 2684: unknown base
  unsure 2685: unknown base
  unsure 2686: unknown base
  unsure 2687: unknown base
  unsure 2688: unknown base
  unsure 2689: unknown base
  unsure 2690: unknown base
  unsure 2691: unknown base
  unsure 2692: unknown base
  unsure 2693: unknown base
  unsure 2694: unknown base
  unsure 2695: unknown base
  unsure 2696: unknown base
  unsure 2697: unknown base
  unsure 2698: unknown base
  unsure 2699: unknown base
  unsure 2700: unknown base
  unsure 2701: unknown base
  unsure 2702: unknown base
  unsure 2703: unknown base
  unsure 2704: unknown base
  unsure 2705: unknown base
  unsure 2706: unknown base
  unsure 2707: unknown base
  unsure 2708: unknown base
  unsure 2709: unknown base
  unsure 2710: unknown base
  unsure 2711: unknown base
  unsure 2712: unknown base
  unsure 2713: unknown base
  unsure 2714: unknown base
  unsure 2715: unknown base
  unsure 2716: unknown base
  unsure 2717: unknown base
  unsure 2718: unknown base
  unsure 2719: unknown base
  unsure 2720: unknown base
  unsure 2721: unknown base
  unsure 2722: unknown base
  unsure 2723: unknown base
  unsure 2724: unknown base
  unsure 2725: unknown base
  unsure 2726: unknown base
  unsure 2727: unknown base
  unsure 2728: unknown base
  unsure 2729: unknown base
  unsure 2730: unknown base
  unsure 2731: unknown base
  unsure 2732: unknown base
  unsure 2733: unknown base
  unsure 2734: unknown base
  unsure 2735: unknown base
  unsure 2736: unknown base
  unsure 2737: unknown base
  unsure 2738: unknown base
  unsure 2739: unknown base
  unsure 2740: unknown base
  unsure 2741: unknown base
  unsure 2742: unknown base
  unsure 2743: unknown base
  unsure 2744: unknown base
  unsure 2745: unknown base
  unsure 2746: unknown base
  unsure 2747: unknown base
  unsure 2748: unknown base
  unsure 2749: unknown base
  unsure 2750: unknown base
  unsure 2751: unknown base
  unsure 2752: unknown base
  unsure 2753: unknown base
  unsure 2754: unknown base
  unsure 2755: unknown base
  unsure 2756: unknown base
  unsure 2757: unknown base
  unsure 2758: unknown base
  unsure 2759: unknown base
  unsure 2760: unknown base
  unsure 2761: unknown base
  unsure 2762: unknown base
  unsure 2763: unknown base
  unsure 2764: unknown base
  unsure 2765: unknown base
  unsure 2766: unknown base
  unsure 2767: unknown base
  unsure 2768: unknown base
  unsure 2769: unknown base
  unsure 2770: unknown base
  unsure 2771: unknown base
  unsure 2772: unknown base
  unsure 2773: unknown base
  unsure 2774: unknown base
  unsure 2775: unknown base
  unsure 2776: unknown base
  unsure 2777: unknown base
  unsure 2778: unknown base
  unsure 2779: unknown base
  unsure 2780: unknown base
  unsure 2781: unknown base
  unsure 2782: unknown base
  unsure 2783: unknown base
  unsure 2784: unknown base
  unsure 2785: unknown base
  unsure 2786: unknown base
  unsure 2787: unknown base
  unsure 2788: unknown base
  unsure 2789: unknown base
  unsure 2790: unknown base
  unsure 2791: unknown base
  unsure 2792: unknown base
  unsure 2793: unknown base
  unsure 2794: unknown base
  unsure 2795: unknown base
  unsure 2796: unknown base
  unsure 2797: unknown base
  unsure 2798: unknown base
  unsure 2799: unknown base
  unsure 2800: unknown base
  unsure 2801: unknown base
  unsure 2802: unknown base
  unsure 2803: unknown base
  unsure 2804: unknown base
  unsure 2805: unknown base
  unsure 2806: unknown base
  unsure 2807: unknown base
  unsure 2808: unknown base
  unsure 2809: unknown base
  unsure 2810: unknown base
  unsure 2811: unknown base
  unsure 2812: unknown base
  unsure 2813: unknown base
  unsure 2814: unknown base
  unsure 2815: unknown base
  unsure 2816: unknown base
  unsure 2817: unknown base
  unsure 2818: unknown base
  unsure 2819: unknown base
  unsure 2820: unknown base
  unsure 2821: unknown base
  unsure 2822: unknown base
  unsure 2823: unknown base
  unsure 2824: unknown base
  unsure 2825: unknown base
  unsure 2826: unknown base
gcggcggtgggggtgcggccgaggcccgagccctgcccggggccgggccgcggggcgggcgggcgaaccgcgggcgaggcggcgtctgcttgcgcggtgcagccccagcgtagcccggggctgccggtgccggccgcgccattgttgggggagggggcggctgttgagggcggcggagtagggggcgagcgaaggcggtggcagagaggagcggaggcttcccatggggaacacgctgacctgttgcgtgtcccccaatgccagccccaagctgggccggcgcgcggggtcggcggagctgtactgcgcgtccgacatctacgaggcggtgtccggggacgcggtggcggtagcgcccgctgtggtggagcctgccgagttggatttcggagagggcgagggccaccacctgcagcacatcagcgaccgcgagatgcccgaagatttagctttggagtcaaacccttctgaccatccaagggcaagcacaattttcctgagcaaatctcaaacggatgtgcgagaaaagaggaagagcaaccatttgaaccatgtatctccagggcagcttactaaaaagtatagctcatgctcaacaatatttctagatgacagcacagtcagccagcctaatcttagaaccacagtaaaatgtgtgaccttagcaatatattaccacataaagaacagagatgcaaatagatccctggatatttttgatgagagatcacatccacttacacgagaaaaagttccagaggaatactttaagcatgatcctgagcacaaatttatttacagatttgttcgtactctttttagtgctgcacagctaacagctgaatgtgcaatagtaactttggtttacttagaaaggcttttaacttatgctgaaatcgacatttgtcccaccaactggaaaaggattgttctgggagccattcttcttgcctccaaggtttgggacgatcaggctgtatggaatgtggactactgccagatcctcaaggacattacagttgaggacatgaatgaaatggaaaggcattttctggagcttcttcagtttaatattaatgttcctgccagtgtttatgccaaatactactttgaccttcgctccttagcagatgacaacaacctgaattttctatttgctcctcttagcaaagaaagagcacagaacctagaggctatttctagattgtgtgaagacaaagacttgtgtagagccgctatgagaaggtctttcagtgctgataacttcattggtattcagcgctctaaagccatcctctcttaaaaggagaaatgaggggttataacgtcatgggaccttcatctacaaagactggagaaataccacctttcctgctcaaaaaccagcaaaattagtgttttcatcaaaaggaaagatctcaaattcaagagactcatggacaacaaggattatactccacaggaaagaatgggaccttgtcaatgcaacaaaacactcttacactcttctgtcctttttaatgtaaacagagttacaaaaaccactccaaagtgaaggctcccatcctacacacagatatttgcttactgtgtgggccgatagctgtgaactatgtaaggttttttaaacaatagtttaaatttttagactttaaagacactaaccatataacttttatgtttcttccagtttctctccctccccccgcattttgctgcatatgcctttaaaatcaatgcagtattaccattaaaacatgggactctaactaaagccacttaggagcagacagcagcgttgttaggtactgaagggttcttcctccctactgttaaccattgaagctgctagtcattggcaatcattttaaaccaaaaagctgctggataacatttgtcattcatattctttgcaagcattactttagcattttagcatgtttggggtcataaacagaggaagtatcagttattgatatctacttctattggagtccatgttgcatttcttgtgaactataaatggtgcttctcattttctgataatttttctcttgctaaataaatgtattaaaagatattttcataatgccaaccaacatggtggttcagtgacgatgagaaaaagtgaagcagttttaagcttgaatatagtttgggccctccaaggcactgcagcatgagtataaatgctataaacctttaaaaaacatgatttgaaagnnnnnnnnnnnnnnnnnnnnnnnnnnnnnnnnnnnnnnnnnnnnnnnnnnnnnnnnnnnnnnnnnnnnnnnnnnnnnnnnnnnnnnnnnnnnnnnnnnnnnnnnnnnnnnnnnnnnnnnnnnnnnnnnnnnnnnnnnnnnnnnnnnnnnnnnnnnnnnnnnnnnnnnnnnnnnnnnnnnnnnnnnnnnnnnnnnnnnnnnnnnnnnnnnnnnnnnaggaatggctactacactccaacctggacaacgttatcaagaccccatctcttagaaaaatgnnnnnnnnnnnnnnnnnnnnnnnnnnnnnnnnnnnnnnnnnnnnnnnnnnnnnnnnnnnnnnnnnnnnnnnnnnnnnnnnnnnnnnnnnnnnnnnnnnnnnnnnnnnnnnnnnnnnnnnnnnnnnnnnnnnnnnnnnnnnnnnnnnnnnnnnnnnnnnnnnnnnnnnnnnnnnnnnnnnnnnnnnnnnnnnnnnnnnnnnnnnnnnnnnnnnnnnnnnnnnnnnnnnnnnnnnnnnnnnnnnnnnnnnnnnnnnnnnnnnnnnnnnnnnnnnnnnnnnnnnnnnnnnnnnnnnnnnnnnnnnnnnnnnnnnnnnnnnnnnnnnnnntgttcagacaaggttttgtaaaggtttgtagcatttatatttctacaagtatcaaagcttaaaattacactgaacttttggaataccttgtatctccataaaatgccctctttttaaaagtagttacccgcagagctgtgctctatatgctttgattaccgcagtttctttaaaggaagattttgaagagcagtgttaattaacatgtaataaaaggaattggaccctaattatagaaggtgatatgaacagctgttttatcatcctacatgctaccaagctgtaggtgtcccattaagtcctgctatttaagaaatacttacataacccttaggaactcttcaggctttaaaaggcaaggagcaaataattttaggagaccgataatgtcacctaaatttgaaatactaagaagaggttagtgttctcaactatgtgaaatctgtttctcctactttctcaaatctaatcctaggaatcttgcttataaacaaagcatttctgggacaggagtacttcctctattatagcaatgcttcacatcatattgtgctgcagtttccatcatttttaaaggacagagacataaatgataaataatggtatacaaatattacaatctaccacctcaaaaaaacaaatattgtttatggaattcagagtttggagattcaagtattgattgcagttttattttgaaaagaatgctacaatttatgtggtttttatttctcatgtttatattaaaagctaataaactctattttaattaaaaaaaatctatgtcgggtgcggagaaagaggtaatgaaatgg

SEQ ID NO: 984 - DNA, 479 bp, Human
  unsure 27: unknown base
  unsure 37: unknown base
  unsure 41: unknown base
  unsure 70: unknown base
  unsure 80: unknown base
  unsure 96: unknown base
  unsure 100: unknown base
  unsure 102: unknown base
  unsure 106: unknown base
  unsure 110: unknown base
  unsure 131: unknown base
  unsure 141: unknown base
  unsure 145: unknown base
  unsure 152: unknown base
  unsure 154: unknown base
ctattatattaatctcccagaatcagnttttagtttngttnaatctctgacatgtttcgttgattcctgntttcatcttnaacatttcttcgttgntaantngtgnttgntataaaataagcaacatcttnaatgcttganttgntttcgangnttattctgtaataagatatttaaagatataattttttccctaaatgctttattagacttttctcataagttttgactggtactgttttcattgttatttaattttgtgttttttaacttctttcatgatttccttttaactgaaggttttcttagatatttagtttgctggtatattcttttaaaattgtatcattgctttctttctatattggattattgtcagagaacatgatttgcatgatattaactttttggagtatattgttgcatctttgtggcctagtacatagttaatttagtgaatgcttccagttgtacttgaa

SEQ ID NO: 985 - DNA, 3381 bp, Human
agttggctctacgaccgccgttgccgctgccagagagggccagggcagggcagggacgcgcagcatcggggcgggcgtggggccggagaaaagggtgtcggggccacacacgcaccctcgctgcagtccagctcctcccgaagctcgcacgcccagagcgcacggagcgggggactgcccgcccagacgcccgcccgccaacccgcccacgagccggggccaaagcctgggagcctgcgaggggaggaggcccaggggggcggggtggggggcgggggtgggtgccgcgctgccgcggagctgctactcggcgcgttttgcatgaagatggcggctcccaccgccaacaaggcagcctccctgggctgtaacaacaagcctgcgttcccggagctggatttcaggtcgggagctcgggtggaggaattgaacaaactcatccaagaatttacgaagcacgaccagcgggaatacgacgaccagagagcgctggagattcacacagccaaggatttcatcttttccatgctgggaatggtgcaaaagctggaccaaaagcttccagtggctaatgaatacctgttgctctctggaggtgtccgggaaggcgtggtggacctggacttagatgagcttaatgtctatgcccggggtactgactatgatatggactttaccctcttggtgccagccctcaagctgcatgaccgtaatcagcctgtgacactcgacatgcgccactcagccttgtgccactcttggctgagccttcggctctttgatgaggggacaatcagtaaatggaaagactgctgcaccattgtagatcacatcaatggtgccaccaactacttcttctcacctaccaaagtggctgactggttctatgactctatcagcattgtcctatcagaaatacagaagaaaccccagcgagggatgccaaaggtagaaaaggtggaaaaaaatgggaccatcatctccatcattctgggtgtagggagtagtcgcatgttgtatgatattgtccctgtggtatctttcaaaggttggcctgcagtggcccagagctggctcatggagaaccacttttgggatgggaagattactgaggaagaggtcatcagtgggttttacttggtgcctgcttgctcctacaagggtaagaaggacaatgaatggcggctgtcctttgccaggagcgaggtgcagttgaagaagtgcatctccagcagcctcatgcaggcctatcaggcctgcaaagccatcatcattaaactgctgtcccggcccaaggctattagcccctatcacctgcggagcatgatgctctgggcctgcgacagacttcctgccaactacttggctcaagaagactatgcagcccactttttgctgggcctcatcgatgacctgcaacactgtctggtcaacaagatgtgccccaattatttcatccctcagtgcaacatgctggaacatctgtctgaggagacagtcatgcttcacgcccggaagctgtcctctgtgcgctcagacccggcagagcacttgcgcaccgccattgagcatgtcaaggcagccaaccggctgacactggagctccagaggcgaggtagcaccaccagcatcccctctccacagtctgacggaggggaccccaaccagcctgatgaccgtttggcaaaaaaactgcagcagctagtgactgagaacccgggaaagtcaatctctgtctttatcaatcctgacgatgtcacaaggccccatttcagaattgatgacaaatttttctgagtgttagctgactttttttttcctgattcttaaactctgataatgtgtcgtgtggtttgtgatgctatctttctgttttttacatatccagcctagattggatttgttaagaacaaattttaagtttcctggttctgcaggatggtgcaggctctgaaacagtatattactatttcatattctgcctctgatttcgttgtttactttttgtagttattgtcatgctctttagtttgttggagtttttttttctttttaaggagatcttaagccatagatgaaaatgcccatgaatcctcttgcttttttctgtttcatacttggtgcaaatttgttcatgggtatggggaaacaaatctctttctgatgcttaacgattctatcctattatttttattattttgtttttgtcttttttcttatgagctttcaccactactgatatttgagaatcatatgaacctgggaactacttggcatgttagctggatttatttattttggccagtgaccagagtagtttccccccttttccaccaaacaatgtaaactttgaaagtgataatactacaaattgtgttttggagcaacttcattgaatgtaattgtcctcaaattagagaacactgggtggtttgaagggtgtctttgacagttttccaagaagaattaaggtttccaaatgttaattttagcatatgtaattatttgaagccttatttaaatcctattaaagaacataccattataattattatttgcactaatctttgccattgtcagaattgcaaagtgtgtttcaatataaattaacaaccactctcgaaattctatcattttttcattttgcccatttctatcagtgaaatgattctttgcatttgcttagttctccttcagttgtggggtcctgctttgccctctttgatattcctggttcctgtcttactgagagaagttgttaaagctttatacatgttgaccccatctaaagctggggaaaatatacacttgatgaagtaggtgtctttgtatttatttcttttggggtcatagaggtaagcttttttgtaaaatctctactcttcctgagagttttgagaaaaactggcaggaagaacttacaatccccaaatagaagataccacgtctgttcaaaagcaggtattgctatagagcagcacccaggaaatatctgtgggtggcagccttggtatagaggtgtcctgtcttcatgagtgaagttacttgcctgattaggtgctggaaggtattggctccttgttttggtgtggactaatggcaagctggtgtttaagaggtcaggaggcctgctgatctttcaaaggacacccatgatgtctactcatagaaagggcaagtaacgtgttcattttggtcttgaatgtccaaactcaagggttggattttggccaattgaaatcagacatatgcgatcttgggtttttgcatggaaattaatgtaatgcttataaatgaaaaatgaaaacatttcaaccatctaagtcaaacacaaaaataataaaaaaagaaacatactggcctcgaaaaaaaaaaaaaaaa

SEQ ID NO: 986 - DNA, 4485 bp, Human
gcggagttggcggaggctcctccagggactggggcacagatctgcgtagaaacgggtggcggggaagagaggggaggagagctctgagtgggaagcggagccgggggcctgggacccgtcgcgtcagagccaggcaagtgaaccggagcaaacgacttccgatccagtctgcgctgttgcggctcccgtttgggatttgatttgcagcatctttgagcctctacgacaaaaaaccgcgaagcacgcccagccctcccccggcaccccgaaaagcacccactccctcccggggacacagctgggcgcgtccacacccccgcagccccacaccatgttgtgcggaaggacttccactccccgcctgtgtcgttgatgtcagaccccaggccagcctccgggcgctgcagttctcccggctaatgctgaggctgcggctccggctctagcacaggcaccagccgccgccgcacccggccccagcgcccaccgtctgcatgtgcccgccgtagccgtctgcccagcccgcagcccgcgctccacggagcgctggagaccaccgtggggggccccttctgccctcgagagaagcggtcttggaggtattgatttaggtggttggattttttccgtggatctatcaattcacaattcgaatttggaagaaagaaggaaaacatgacgtctccagccaaattcaaaaaggataaggagatcatagcagagtacgatactcaggtcaaagagatccgtgctcagctcacagagcagatgaaatgcctggaccagcagtgtgagcttcgggtgcaactgttgcaggacctccaggacttcttccgaaagaaggcagagattgagatggactactcccgcaacctggagaagctggcagaacgcttcctggccaagacacgcagcaccaaggaccagcaattcaagaaggatcagaatgttctctctccagtcaactgctggaatctcctcttaaaccaggtgaagcgggaaagcagggaccataccaccctgagtgacatctacctgaataatatcattcctcgatttgtacaagtcagcgaggactcaggaagactctttaaaaagagtaaagaagtcggccagcagctccaagatgatttgatgaaggtcctgaacgagctctactcggtgatgaagacatatcacatgtacaatgccgacagcatcagtgctcagagcaaactaaaggaggcggagaagcaggaggagaagcaaattggtaaatcggtaaagcaggaggaccggcagaccccacgctcccctgactccacggccaacgttcgcattgaggagaaacatgtccggaggagctcagtgaagaagattgagaagatgaaggagaagcgtcaagccaagtacacggagaataagctgaaggccatcaaagcccggaatgagtacttgctggctttggaggcaaccaatgcatctgtcttcaagtactacatccatgacctatctgaccttattgatcagtgttgtgacttaggctaccatgcaagtctgaaccgggctctacgcaccttcctctctgctgagttaaacctggaacagtcgaagcatgagggtctggatgccatcgagaatgcagtagaaaacctggatgccaccagtgacaagcagcgcctcatggagatgtacaacaacgtcttctgcccccctatgaagtttgagtttcagccccacatgggggatatggcttcccagctctgtgcccagcagcctgtccagagtgagctggtacagagatgccaacaactgcagtctcgcttatccactctaaagattgaaaacgaagaggtaaagaagacaatggaggccaccctgcaaaccatccaggacattgtgactgtcgaggactttgatgtgtctgactgcttccagtacagcaactccatggagtccgtcaagtccacggtctctgaaaccttcatgagcaagcccagcattgctaagaggagagccaaccagcaagagacagagcagttttatttcacaaaaatgaaagagtacctggagggcaggaacctcatcaccaagttacaagccaagcatgaccttctgcagaaaaccctgggagaaagtcagcggacagattgcagtctagccaggcgcagctcaactgtgaggaaacaggactccagccaggcaattcctctggtggtggaaagctgtatccggtttatcagcagacacggactacagcatgaaggaattttccgggtgtcaggatcccaggtggaagtgaatgacatcaaaaatgcctttgagagaggagaggaccccctggctggggaccagaacgaccatgacatggattccatagctggtgtcctgaagctttacttccgggggctggaacaccctctcttccccaaggacatctttcatgacctgatggcctgcgtcacaatggacaacctgcaggagagagctctgcacatccggaaagtcctcctagtcctgcccaaaaccactctgattatcatgagatacctctttgccttcctcaatcatttatcacagttcagtgaagagaacatgatggacccctacaacctcgccatctgcttcgggccctcgctaatgtcagtgccagagggccacgaccaggtgtcctgccaagcccacgtgaatgagctgatcaaaaccatcatcatccagcatgagaacatcttcccaagccccagggagctggagggccctgtctacagcagaggaggaagcatggaggattactgtgatagccctcatggagagactacctcggttgaagactcaacccaggatgtgaccgcagagcaccacacgagcgatgacgaatgtgagcccatcgaggccattgccaagtttgactacgtgggccggacagcccgagagctgtcctttaagaagggagcatccctgctgctttaccagcgggcttccgacgactggtgggaaggccggcacaatggcatcgacggactcatcccccatcagtacatcgtggtccaagacaccgaggacggtgtcgtggagaggtccagccccaagtctgagattgaggtcatttctgagccacctgaagaaaaggtgacagccagagcgggggccagctgtcccagtgggggtcatgtagccgatatttatcttgcaaacatcaacaagtaagctctgcttttcattttctgctcccctgaatgacttgcaacacccagcctcaccctctggcctaacccccatctccattcctgtgctgcacgtagggctcccagctcccccagcctaacagtttgcatgtggtcattgctgctgcaaggcggacagggctgaggatgctgctacaagcctcggggcaggtccaggtctccagctagctgccctcgtgctgtggaagggtgctttactgtgtgttcccgcagtgtctgtccacccagacctttgtggcagtcttacagctaaaactttgaccaaagctttggtcactttatgcaacctggttttgtactgtttctcagaggtgccttcttttttccaatccatactcaaataatagtctttgatgtctgtcttccttgacccgtgttcgtgcaaagattcagagtctgtgtgtggcttctactaggctgatgttacaccaggtgggtttattgagatatcatgtgtctgttcctccccctgtcctgcattcactcctgtggaggaaaggaggccacgatgtccctaaggaaagctttgtcctgagctcttcattcattggctaacccctagctcccttttcttctgccctttcacaccaggagaaataattttccattttgttcctattgctttggccttttgtattattctacccccttagtccctttgcagatccccactcctgctcagcaggctcttacctctgacccccagctttcattgtggctgttagcaacatcctggggtttaaactccacccacgcccgatctggctgtctagagggattctacgcctgcgtgctgccgcctccccaagaggcattcaggttattggagaactaatctcatctcaaggggccagacaccaagtcccaaagcctacagacctctttccgccaggccctgaaacctggccccgtgccagcaggatgacaagccccagggcgctcctgatgaatatggattggagatgatgtacagtttttattcccctctggcttttgaggaatgaaatgatttgcactttgaaaacctgttaaccgtagcctctggacactgagactggaaggagaataaaggatgcttgttgtttttaaactataccaggtttcccagatctcttggcttttttccacccagacggtagcagggggagtggtcggggcacgtggctcttttccatctctttcaacctcaagttagtaaagtcgcgtattcagatcacttactcagcgtgagtataatttaattccgagcagttttaacaac

SEQ ID NO: 987 - DNA, 1031 bp, Human
ccgccacgcccggcccaacaacttaatcttttattagctttgcttaagagggccaattaaatcaaagccctttagttccctttaacagggactggagttatgatgcatgtgttacgacttttggcccactgtccatgcaactctaagtgcaggttgatttgctttccagaaatcccaaaggggctgctcttggatcaccgaagagccttacctatatcaaatcaaaaagacattctgggtcagattagactatgctcctggccctacagattgcacataaactatcataaatacagctttttcagggaactagttctaaaactcttacctgctgagaataagtcttaacactaagatgactgtattatatcaatttattattagaatcagacttatacctagcacaattaactattgtgtgggcaaagaacatttaaagggcatagtagaggtaaggagagacacatactcagctagagataaaaatactaagttgcactgattacttaaaatactagtcacaccataaaagtgccctgtagtttcaaaaacacgtaagcaatgaaatgttagccattatgtgttaaactacttaatctcatttctgtgatgtgaatatttttaaccccctttttgtagatgagggaactgacaagtgacttgtccaaggccatatagctgtgagaaaacccatgcattctcttttcagagttcatgctatcactcaactttaaagtaggccaagattaatgttggtaagggtttgtaatctgtaagaatgctaaaaacgtaagtatatatatcattttagatttgacattttgtatcttgccagtttttaggagaacttttcattttgttaagtatgcatgaatatagttgagtatatgagtaactggttcttatgctgctgttttgtatttttaccagcaggaagattgcaaaagttgatgtatgtaaatcttgaaatatttctaagttttatgtataacaaaatatgtattttaataaacttcttttgatatttaaaa

SEQ ID NO: 988 - protein, 82 aa, Human
MMHVLRLLAHCPCNSKCRLICFPEIPKGLLLDHRRALPISNQKDILGQIRLCSWPYRLHINYHKYSFFRELVLKLLPAENKS

SEQ ID NO: 989 - DNA, 1899 bp, Human
gggatgggggcaggcccggcctgccctctgcctcccctggctggtggagaggctttccctttccccagccctgagcagggcctggcactgagtggagctggcttccctgggatgcttggggccttgcctctccctctgagtctggggcagcctccaccttctccattgctcaaccacagtttatttggtgtgctgactgggggaggaggacaacctccccctgagcccctgctacccccaccaggaggacctggtcctcccctagccccaggagagcctgaagggccttcgcttttggtggcttccttgcttcctccaccaccctcagaccttcttccacctccttcagcacctcccagcaacctccttgcctctttcctgcccctgttggctctgggccccacagctggggatggggagggatctgcagagggagccgggggtccaagtggggagccattttcaggcttgggagacctgtcccccctacttttccccccactttcagccccccctaccctcatagctttaaattctgcgctgctggctgccaccctggatcccccctcggggacacccccccagccctgtgtcctgagtgccccccaacctggaccacctacctccagtgtcaccacggcaactactgacccgggggcctcctctctgggcaaggccccctccaactcagggagacccccccaactccttagccctctgctgggtgccagcctgctgggtgacctgtcttcactgaccagcagccctggagccctccccagcctgttgcagcctcctggccctcttctctctggccagttggggctgcagctcctccctggggggggagctcctccacccctctcagaggcttctagtcccctagcctgcctgctacagagtctccagatccctccagagcagccagaagccccctgtctaccccccgagagccctgcctcagccctcgaaccagagcctgccaggcctcccctcagtgccttagccccaccccatggttctcccgaccccccagtccctgagctgctcactgggagggggtcagggaaacggggccggaggggaggagggggacttaggggcattaatggtgaggccaggccagcccggggccgaaagcctggcagccggcgggagcctggccgactggccctcaaatgggggacacgtggtggcttcaatggacaaatggaaaggtccccaagaagaacccaccattggcagcataatggggagctggctgaagggggtgctgagcccaaggatccaccccctcccgggccccattctgaggaccttaaggtgcccccgggagtagtcagaaagtctcgtcgtggccgtaggagaaaatacaaccctacccggaacagcaatagctcccgccaggacattaccttggaacccagccctacagcccgagcagctgtccctctgcctccccgggcccgccctggccgtcctgccaaaaacaagaggaggaaactggccccatagcagccatacctggagctggatctgaccctgattggggagagctgagtgctgagccttgggagcccctgccagccacctgcacctgtggacagtggccaacaggctcagtttacaaacctgtgagctactgttggctgctgccctccttcccagtgaaagagacgttgtgatgatgcgactgaggattatgcaacgtggtccaaccggagcggccagcatgaccagctgtccaggggctgcctcctgccttttcttttgtaaagacaagacccttgggagttttaattctgttttgtacttgccctgtggggcctccactgcttttctatgggagacactcttaatttaacagatgagaatattttaaaaaaaaaaaaaaaaaaa

SEQ ID NO: 990 - DNA, 1786 bp, Human
  unsure 511: unknown base
  unsure 512: unknown base
  unsure 513: unknown base
  unsure 514: unknown base
  unsure 515: unknown base
  unsure 516: unknown base
  unsure 517: unknown base
  unsure 518: unknown base
  unsure 519: unknown base
  unsure 520: unknown base
  unsure 521: unknown base
  unsure 522: unknown base
  unsure 523: unknown base
  unsure 524: unknown base
  unsure 525: unknown base
  unsure 526: unknown base
  unsure 527: unknown base
  unsure 528: unknown base
  unsure 529: unknown base
  unsure 530: unknown base
  unsure 531: unknown base
  unsure 532: unknown base
  unsure 533: unknown base
  unsure 534: unknown base
  unsure 535: unknown base
  unsure 536: unknown base
  unsure 537: unknown base
  unsure 538: unknown base
  unsure 539: unknown base
  unsure 540: unknown base
  unsure 541: unknown base
  unsure 542: unknown base
  unsure 543: unknown base
  unsure 544: unknown base
  unsure 545: unknown base
  unsure 546: unknown base
  unsure 547: unknown base
  unsure 548: unknown base
  unsure 549: unknown base
  unsure 550: unknown base
  unsure 551: unknown base
  unsure 552: unknown base
  unsure 553: unknown base
  unsure 554: unknown base
  unsure 555: unknown base
  unsure 556: unknown base
  unsure 557: unknown base
  unsure 558: unknown base
  unsure 559: unknown base
  unsure 560: unknown base
  unsure 561: unknown base
  unsure 562: unknown base
  unsure 563: unknown base
  unsure 564: unknown base
  unsure 565: unknown base
  unsure 566: unknown base
  unsure 567: unknown base
  unsure 568: unknown base
  unsure 569: unknown base
  unsure 570: unknown base
  unsure 571: unknown base
  unsure 572: unknown base
  unsure 573: unknown base
  unsure 574: unknown base
  unsure 575: unknown base
  unsure 576: unknown base
  unsure 577: unknown base
  unsure 578: unknown base
  unsure 579: unknown base
  unsure 580: unknown base
  unsure 581: unknown base
  unsure 582: unknown base
  unsure 583: unknown base
  unsure 584: unknown base
  unsure 585: unknown base
  unsure 586: unknown base
  unsure 587: unknown base
  unsure 588: unknown base
  unsure 589: unknown base
  unsure 590: unknown base
  unsure 591: unknown base
  unsure 592: unknown base
  unsure 593: unknown base
  unsure 594: unknown base
  unsure 595: unknown base
  unsure 596: unknown base
  unsure 597: unknown base
  unsure 598: unknown base
  unsure 599: unknown base
  unsure 600: unknown base
  unsure 601: unknown base
  unsure 602: unknown base
  unsure 603: unknown base
  unsure 604: unknown base
  unsure 605: unknown base
  unsure 606: unknown base
  unsure 607: unknown base
  unsure 608: unknown base
  unsure 609: unknown base
  unsure 610: unknown base
  unsure 611: unknown base
  unsure 612: unknown base
  unsure 613: unknown base
  unsure 614: unknown base
  unsure 615: unknown base
  unsure 616: unknown base
  unsure 617: unknown base
  unsure 618: unknown base
  unsure 619: unknown base
  unsure 620: unknown base
  unsure 621: unknown base
  unsure 622: unknown base
  unsure 623: unknown base
  unsure 624: unknown base
  unsure 625: unknown base
  unsure 626: unknown base
  unsure 627: unknown base
  unsure 628: unknown base
  unsure 629: unknown base
  unsure 630: unknown base
  unsure 631: unknown base
  unsure 632: unknown base
  unsure 633: unknown base
  unsure 634: unknown base
  unsure 635: unknown base
  unsure 636: unknown base
  unsure 637: unknown base
  unsure 638: unknown base
  unsure 639: unknown base
  unsure 640: unknown base
  unsure 641: unknown base
  unsure 642: unknown base
  unsure 643: unknown base
  unsure 644: unknown base
  unsure 645: unknown base
  unsure 646: unknown base
  unsure 647: unknown base
  unsure 648: unknown base
  unsure 649: unknown base
  unsure 650: unknown base
  unsure 651: unknown base
  unsure 652: unknown base
  unsure 653: unknown base
  unsure 654: unknown base
  unsure 655: unknown base
  unsure 656: unknown base
  unsure 657: unknown base
  unsure 658: unknown base
  unsure 659: unknown base
  unsure 660: unknown base
  unsure 661: unknown base
  unsure 662: unknown base
  unsure 663: unknown base
  unsure 664: unknown base
  unsure 955: unknown base
  unsure 956: unknown base
  unsure 957: unknown base
  unsure 958: unknown base
  unsure 959: unknown base
  unsure 960: unknown base
  unsure 961: unknown base
  unsure 962: unknown base
  unsure 963: unknown base
  unsure 964: unknown base
  unsure 965: unknown base
  unsure 966: unknown base
  unsure 967: unknown base
  unsure 968: unknown base
  unsure 969: unknown base
  unsure 970: unknown base
  unsure 971: unknown base
  unsure 972: unknown base
  unsure 973: unknown base
  unsure 974: unknown base
  unsure 975: unknown base
  unsure 976: unknown base
  unsure 977: unknown base
  unsure 978: unknown base
  unsure 979: unknown base
  unsure 980: unknown base
  unsure 981: unknown base
  unsure 982: unknown base
  unsure 983: unknown base
  unsure 984: unknown base
  unsure 985: unknown base
  unsure 986: unknown base
  unsure 987: unknown base
  unsure 988: unknown base
  unsure 989: unknown base
  unsure 990: unknown base
  unsure 991: unknown base
  unsure 992: unknown base
  unsure 1005: unknown base
acgtcaggattgcgtcttatgttaatgcgaaatatgcatagctgtcatccgaagtataccaccattcccttcagcactctacgtcagaggaggcacgtcaggggagacaaaattcctcttcggacagtccctcaaaagacaggaatgtggacatatattccacatttctctttgtctcctgaggaagaagcatagagttgggagtttctcctggattgcaccatgctgtattgggaggaggtcaggctgcgctgggcatatctaataagctttttcttctcttctacatgtttttggcattgtgctcaactgaagtagtacaaattcttaactatgttcaggaattctcacaaaggcaatgtgatcagcgtggtgttaagttcatatatctatgaagaaacgaggaccagtggtgtttgtttttacgcttttcattttaaatttatattttatttattattttaattttgtgagtacgtagtacctatatgtatctatggattatatcagnnnnnnnnnnnnnnnnnnnnnnnnnnnnnnnnnnnnnnnnnnnnnnnnnnnnnnnnnnnnnnnnnnnnnnnnnnnnnnnnnnnnnnnnnnnnnnnnnnnnnnnnnnnnnnnnnnnnnnnnnnnnnnnnnnnnnnnnnnnnnnnnnnnnnnnnnnccgaccagagaaaaaccctgtagacattagtcactcctcattctgtctcaaaccctctccctgaccctcagccctaggtagcaactacctagtgcgatcaatcccatatgcatagattaccatattgtggacatttcctataagcggaattgcacaataggggagctgttatgactgacataacacgtagcacaatattttcaagatttcgtccacattgtaggcttacccacagggggaaaccattttattgggggcttttagtaacaccggtgttttctccttccttannnnnnnnnnnnnnnnnnnnnnnnnnnnnnnnnnnnnnccttcctgagacnttctttccttccctccttcctcctatttctctcttactccttctgccctctctctttcctatgccttaggtgcatcccacattctgcatttttttggggaaatcctcgacaggtgcaggaaaattgtgttattgtaactatttaccgttatctctctttcacggctctccatcagttgtgaacatctattggtttatcccaagtcactaagcatattttcattaggtaaacctgtttttccttatacagctgtttctggagtatagggtcgcatactcataaacccagtgtaactcagaaacgcatctaatattccagtaaacccatcataacgttgaaaaatcgtaaatcaaaccatcataagtcacggtttgtccgtggatatgggcgtcatcaattccattgtattcagtaatgctgtacaccattaacaatggcagactgattgggagtggatattgatagcattataaaagtcagttattagagggatacttctttaacctgactgaagaactgatctaatggctttagtacagtgcatgattatgtgcgatgttttgagacagagtagtacatttgtgaatgaaattttatggctttttttttcacttagtaggaaccattgtgtgtggaaaagtgagaaaatggctttctgctgtagggtctggcattcattgtagatgtaagctgatttttctgtgagcaaatcttattcaataaaatactactctttatactaaaaaaaatctatgtcggtgcggagaaagaggtaatgaaa

SEQ ID NO: 991 - protein, 64 aa, Human
TSGLRLMLMRNMHSCHPKYTTIPFSTLRQRRHVRGDKIPLRTVPQKTGMWTYIPHFSLSPEEEA

SEQ ID NO: 992 - DNA, 1788 bp, Human
gggcaggtcccacggaggggatgctgcggccaggctccgtggggtggggcaccctgcgacgggctgctcctcttcccagggccaccggtgagactctcagtgcacagagtgcggttctgtgtggaggtgtgggatgcatctcctggccctcccgtagtggggtgcaaccccaagtgaagaccccgtggctcatgtcaagtgccctcagggctggggctgcccacccgcctgcctgggccgtcttgacaccggagctgcctgcctggatgttggagcgcccagtggattgagtgggaagtgggcctgggtgcttacaggcgatggggtcaccagagcccacccaggggcctcgcctgtcccccattctcattccaaactctgggaggcggtacaaggtcgggagggccagcggggctctctgccaccaggactcacttccgcccatcttggaactgggcctcactttcctgcgagcttctgctgggttctcagtgcccaccagcagctcctttgctctccctgagcccttgaggtcactctgccttgggaatggggagggtttgggtctcagcctcacgctcacggtcctggcttggattttaggcctcagtggcactctgggagcgcttgtgctcttcatggttgccactgggattttccaggaggctctgtggcatttgctgttgctctctttttctgtggaagctctgccttgcttttttttttttcccttttttctgctctgtaggtgcttgagggcggagttgcagatccagcagagactcgatggcactctctcactggatctgatgcgacttgagagcgatggggagacaggatgtgccgcagagtcctcggtgctgcagggtgcacagctgatcgccgtggcctcctcggaccccgcggcggcgggcgtggatgggtcgccactccagggcagcgacatccaggttcagtacgtgcagctggcgccagtgagtgaccacacggccggggcacagacggccgaagccctgcagcccacgctacagccggagatgcagctcgagcacggggccatccagattcagtgagcggtgcccatggcaccaggagcccctcgccggctccgcctacggcccggcccccacgcgccctgctctcacggcctcggcacaggcagcggctgcacgtgttctgctgaagtgcgtctgaaggccgctgcctccgcggggaacagcatcctatgaactgaaagagcagccgccgccgcccccagccggagacccctttcgtttgagtcctgctgttggtgtcggagcacgaggggaggcacggtgcggagagcgtcgcatatgcgcgggaaatcaagaactatgatatttttctgtttaaacagctttttttaatttgctatggtgtttataacaaaaaagaaaatttgaaaaaaaaaatcccaggggagtagcaggagccctttgctgtgtgctctgtccagtgtcatgagacgggagccctttgctgtgtgctctgtccagtgtcatgagacgggagccctttgctgtgtgctctgtccagtgtcatgagacgggagccctttgctgtgtgctctgtccagtgtcatgagacgggagccctttgctgtgtgctctgtccagtgtcatgaggcaggtgtttgcaaagccagctctcggttccgatggggtattgctgacctacttttctaggggaaatgctcttaaacactgtaattatgcatttctaatgaaataaaatgtatttatgaccacaaaaaaaaaaaaaaaaaaa

SEQ ID NO: 993 - protein, 250 aa, Human [sequence omitted]

SEQ ID NO: 994 - DNA, 552 bp, Human
ctaacaccattatctctagctggtagaattatggaaaatttttatttccttctttttgcttctaaattttatataatgagcatatttggctttgtataatcatttttaaaaagttgttttagaagaatagtactgatatatcattcccttttagcagttttctctaggataaaaaataagaggaagtctgagcttaactaattaaaaaaacagatttctttaaaaaatattagcaaatcattagtgttcttactggagaaagggcagtgttcaaagaagaattaaacaaatcattccagttgcaggaaaaattcaatttactgcatgcagactgtttcttgactgaaaagttaattcctttcattcagaatcagtatgcatattcactggctatatttcatctcacatctgcaaacttaatttttcctttcttggtcatcagaagattaggaaataaattttagtccaggcaatagatcctacttggcaagctcaaaataactcaattattaaaaagcagcacacaaagaccagtagtgacttccaaaggat

SEQ ID NO: 995 - DNA, 5726 bp, Human
cggcacgtggactccctttaatccagtgactgtcaggtcgatcatatgccgaggacgatgatcccgccgggggagtgcacgtacgcgggccggaagcggaggaggcccctgcagaaacagaggcccgccgtgggggcagagaagtccaacccctccaagcgacaccgggaccgcctcaacgccgagttggaccacctggccagcctgctgccgttcccgcctgacatcatctccaagctggacaagctttctgtcctgcgcctcagtgtcagttacctccgggtgaagagcttcttccaagtcgtgcaggagcagagctcacggcagcctgcggccggcgccccctcgcccggagacagctgtcctcttgcagggtctgccgtgctggagggaaggctgctgttggagtctcttaatggctttgctctggtcgtgagtgcagaagggacgatattttatgcatcagcaacgatcgtggactatctgggcttccatcagacggatgtaatgcaccagaacatttatgactacatccacgtggacgaccgccaggacttctgccggcagctccactgggccatggaccctccccaggtggtgtttgggcaggccccgcccttggagacaggagatgatgctatcctggggaggctgctcagggcccaggagtggggcacaggcacgcccaccgagtactcggccttcctgacccgctgcttcatctgccgtgtgcgctgcctgctggacagcacctcgggcttcctggcccgggggtcacaggcttggcagctgcggctctgctgtcccgagccactcatgacgatgcagtttcaaggaaaactaaaattcctgtttggacagaagaagaaggcgccgtcaggagccatgctcccgccgcggctgtcgctgttctgcattgcggcacccgttctcctcccctccgcagcggagatgaaaatgaggagcgcgctcctgagggcaaaacccagagcagacaccgcagccaccgcggatgcaaaagtaaaagccaccaccagtctgtgcgaatcggaactgcatggaaaacccaattactcagcaggaaggagcagcagagagagcggcgttttggtgctcagggaacagactgacgctggccgatgggcacaggttcccgccagggccccatgcctgtgcctccggggtggccctgaccttgtccttgaccccaaggggggctcaggggacagggaggaggagcagcacaggatgctgagcagggcctctggagtgacagggcggagggagactccaggacccacaaagcccctgccctggacagcgggaaagcacagtgaggatggtgccaggccgaggctgcagcccagcaagaatgacccgccctccctgcgccccatgccccgcggctcctgcctgccctgcccgtgtgtccagggcactttcaggaactcgcccatctctcacccgccgagcccgtcccccagtgcctactccagccggaccagcagacccatgcgggatgtcggtgaggaccaggtgcaccctcccctctgccactttccccagaggagcctgcagcaccagctccctcagcctggagctcagcgttttgccacgaggggctatcccatggaggacatgaagctgcaaggtgtaccgatgcctccgggggacctgtgtggtccgacgctgctgctagatgtgtccatcaagatggagaaggactctgggtgtgagggtgctgcagacggctgtgtgcccagccaggtgtggctgggggccagtgacaggagccacccagccaccttccctaccaggatgcacctgaaaacagagccagactctcggcaacaggtgtacatctcgcacctggggcacggcgtgcggggggctcagccccatgggagggccactgctgggcgcagcagggagctgacccctttccaccctgcacactgtgcctgcctggagcccacagacggccttccccagtcggagcctccccaccagctctgtgcacggggccgaggtgaacagtcctgcacctgcagagctgctgaggccgcccctgtggtcaagcgggagcccttggactcaccccagtgggctactcacagccagggaatggtgcccgggatgttgcccaaaagtgccttggccacgctggtcccgccccaagcttcggggtgcacattcctgccatagcgcagtgaccaccatccaagctcagatctgtctgtctacgctcagatgcgtcggtggctgggctgccctgctcctggtcaggccggagcccgtcctaagacacactctttgcagagctgtgcatgcgcagtctgctagtgtgtgtgtgcagcatacgcaggagcctatcctgaattttgtaaaatatcccaacagttcttaaatgaaaactggccttaagtctattcaagcatgacagcatttctctttgaggaattaaaatctttaggaaagtgatcatggctggacagcttcatgccccagaggcagcgagcacccgtcccatggctgccaagtccacagtcggggatgaagcagtcgggtgatgctcccaagtccgcagtcggggatgaagcggtcgggtgatgctcccaagtccgcagtcggggatgaagcggtcgggtgacacacctagctcagccctcccaggccacctgcagctcccagcctgtgctgtgcaggcagggtcagcccatcgccacagtgcactgtagaggccagcacacggcaaattagaaatacaacacgcggagaaaggggtccgtgagcccactcatagaggaatctagaatgttccaggcagcagaggctggcagcgtgggtcccacactgccccacaccgtgcggcaggtgctccatggcgccatgacagagtctgaggccagacctggactggaattgacagcataacccctgttccttctggacatctcccgagttctcagtgggtctctgcggacggttcttcctaatctgcctcttggtacatcacgtaatacagagttcacagactccgggtttggaagtacagagaaacacacaacgtagagagaagacacaggaaactgcgctgcctgtgggggtttctctctggctggctgtacagttcactcaaatgagggttcccattgccatcctaggagaataattagggacaagacagacaagtattaatagcattaaaacagttgtaaaggcgatattttctgagagtaggaaatttggatacaaaagcataagtcagaaagtgaaggtcaccaatccaccaacccgagaacctacagctgatggtgcatttcaggcttcttccacggtctggcctggaaccccacccggctggtgcaggcatcagatcagggtgtagaagtcaccccaagcaagaggaagccaggcagtgaggccctggggtgtggctgcagctgggcccacctgtgcgggggtgggaaggccccatcctcagggagagggcatcggcgccctgacgtcagctccactgggagtggcaggagctgtgggagcccatgggtgagggacccaccaccccgctgcactgtgcattgtgcctcccgtgtggacgccctctctgttgttggcccgcgggtgagggacccaccaccccgctgcactgtgcattgtgcctcccgtgtggacgccctctctgttgttggcccgcgggtgagggacccaccacccctagggacccaccaccccgccgcactgtgcattctgcctcctgtgtggacgccctctctgttgtcagtggctttgaggtgtcagtgcttacttagatgctggtttaatgctggacccatttgttaaacgcaccttcactttgtcaaaacccaggtttggttggcaggactgggtcttctgcccaatgccaggtgcctgcgcctctcagtggcctggttcttggacagtttgcccccatgtggcagggatagggataaggatctcctctcagtactggaggagaacagccaaccatctgagcccagagtcacagatccatcgtggccccctatgacccccaagccctaccgagggggcactcactctctgcttagccagggggcgtctttcaaaaggtgacctccatgctgtgctgtcgtgggtgtgagacgtgctcatggccttccactgccatctctcccttatctgatgcctaaagtcacgatggggacagagctacccaggggccagccatggggtgaccagccacctgagggtcagtcacctgtggagagcaggcacctgtgaagaccaggcacctgaggactggcgcctacttcccactttggccctacactggcacagagcccctctttattcatttctcatgctgagcatggcacacttctggcctctgggcatttatggatttaagaccaggatggtatttcagaagcttcccacttccttcctattctaaccgagtgcccagctcctttgctgatcatggaaagacccttaataattaggcctgcaggccaggcgcagtggctcatgcctataatcccagcactttaggaggtcaaggtaggaggatcgcttaagcccaggagttcaagaccagcctgggcaacacaggaagaatgtgtctctacaaaaaataattaaaaatcagatctgctgtatccctgaaaaagtctcaatcaacatgcatgttccactcttggagttccctgttctgagggccagccacgtcctgtgtcctggagcttagccctcagcagctcccttcagcctgggcgccgcctgggtcccaaacgtggcagctgctcttccagtctcggggccgaggagggcagggagctcagtgactgagagtcttgtgtatcacatgtcttgagtgtcctggagccaacggctgtcactgggaaaaacaccaggccccaaagatcgaatcagagacgtggctgcgtgtttgcgattgtagccaggcccttcagtgtcatcaaaggagcactggggcctccttaagcacagacggcagcccctgcccaggaggcttcttcaccacgtcctgccctgcagcctcccagacctttagatgcgcccctgcccaaggccctcctggtgacaggtgccagattgagtggtgggttgctgccaggcaggccacgctgtgttgacgctgcactcagcacgtgggtgttggctctgccggttttgtggtgtggggaccctacaggaggctgcggccctgagagcctgggatcagcgaggtgtccgacatcccttcctcaacggcaacaaaaactccccaagtcagcactttggttattttatagccacaaccctcttggaaaacagtggggaagactatggaacatagaaagtgtggatgtatcacttctctctaaaatgtcattgttagcactaattacaggttcatgtttttctgtttatgtagcttttccctatatagctgaaaaagtattaaagtcaaatataaggtgggaatgggatggaagggaggagatcaatacaacttatatttttgcagtttctactggaagaaaaaagttttcaatacctagaccaacttgttgaatttttaaaacttatgcactataaatgcaactttctctactgctttctcagtgcctttaggaagctttcaaatttttttgtactgtggtttgtattaaatttgcaatattgatgtaaaatacatgacatgctagtacatgtttaac

SEQ ID NO: 996 - protein, 719 aa, Human [sequence omitted]

SEQ ID NO: 997 - DNA, 566 bp, Human
  unsure 42: unknown base
  unsure 67: unknown base
  unsure 70: unknown base
  unsure 102: unknown base
  unsure 106: unknown base
  unsure 110: unknown base
  unsure 146: unknown base
  unsure 149: unknown base
  unsure 165: unknown base
  unsure 178: unknown base
  unsure 194: unknown base
  unsure 197: unknown base
  unsure 206: unknown base
  unsure 239: unknown base
  unsure 241: unknown base
  unsure 248: unknown base
  unsure 262: unknown base
  unsure 268: unknown base
  unsure 272: unknown base
  unsure 273: unknown base
  unsure 274: unknown base
gatgggggcgcaatagtcttgaacattgtataaagtgtccangaatggaagtgctctttgattcatnatnattttcttccttcatattcccctcccagagtntccnatcntaggacatcagcattctcacacaagcctaatggctnatnctgagtaagcagggcntagaaattcactnttcttgatactcagtnctngccttctanacactccttgatcttgcctacctctcccctttncnacatgtnttttcctgtaggancacttnctcnnnttattcctgcctatccaattcttccctatatttcctggaccagctaaagtccagtgtttccagagacttttgaaagtcaacttacactttttccttcttcattcacaaagctcttcttccctgggccctggtatgtatgcctttctctcctactgtctaatagcacctcgtaaattgtcaatgaacttttctaaggggtattcttgaattcccaactagattgtgagcttctggaagacaaggctatgtctttgattgttgtctcccctaccacagcccagtactttagtta

SEQ ID NO: 998 - DNA, 1862 bp, Human
gtacccagggctgccaggcagggccctgcaggggacagacccaagggctgatatggggacacctgctgaggggggaatttaccacggtaagggcagggctgggaggctgggcagccagtttcaccctcgcacaggctgcctggcaagaccagcggctggaggtgatgtcctcagtagagaacggtggccactggaaacgtgtggccagaaggggaaacgctcgggcctctggtgggggccagcctggggtggggtcggccagggtcagctgcctttccttcatgctggggaggagatgttgtgtgcatgtgagaaagcatttgatagcatgccaaaagtttcctccattatgtgcgtgtcaagtgtttgaccaggtcagaactcttgttctatgcgaatgtgctcacgcagacagaagcggaggggctccgtcgctctgccctcacgccgctgaaccgcgagggtctcccgctcctcaggcttgcggctcggccgcgaagtgtgtcaggtgtgcatcctgggtgctcctttgtgctctgtcctacggtgacacaggcggcgtggggttagacaggtaccggtcagactacggtgacacaggcggcgtgcggttagacaggtaccggtcagattacggtggcacaggcggcgtggggttagacaggtaccggtcagattacggtggcacaggcggcgtggggttagacaggtaccggtcagattacggtggcacaggcggcgtggggttagacaggtaccggtcagattacggtggcacaggcggcgtggggttagacaggtaccggtcagattacggtggcacaggcagcgtggggttagacaggtaccggtcagattacggtggcacaggcggcgtggggttagacaggtaccggtcagattacggtggcacaggcggcgtggggttagacaggtaccggtcagattacggtgacacaggcggcgtggggttagacaggtaccggtcagattacggtggcacaggctgcgtggggttagacaggtaccggtcagattacggtggcacaggcggcgtggggttagacaggtactggtcagatgcacgggctccctaaacccctgctgtggcttcggcagtaaagacaggacgcacccatgtcacaagaggagcacaggcaggggtgttggtgttggggcagccctcagggtctccagaccccagccccactcacacagcagcctaggaaggaagggcagagtcccaggtgtcagctggtgggtctcccaggagctgcccctccctggaagtcacaggacaggaatgacagatcagggaactgcaggaagctgccacctctggggtcagaatatgcccagcctgcgggggctctctatcggggtcttcgagagccagacagcctgccttgtgctgcatacctggctttgctctgtgcagaacccagcacacgtgattttgtgtgacatgccagcagcctggctcccaggacaggaggcctgccctgggggaggggctgcaggaggagggggggcaggcacccatgagtctgtccagccttgtcacagatgcatcgcccaccctgcggtcctgatttcagctcacctcagagtaaatcagaataaactgcacccagactttcacgaatgcatgttgacgctttcagttcacccctttctttgctaactttcttcctattttcttctaatgcgagagcttattaattccatatttatcattttgaataacttttctcctttttagtaacaaaatgtacttcactcttagtaaaatgtatttactattttagtaacaaaaatatacttgcctaatcatgtttaaaatatagtgatgtgaaaaattc

SEQ ID NO: 999 - DNA, 1848 bp, Human
cagcttgatgttagatgggattctgtgaccgtttgtatactgacaggtccttccagtctccctccacagtcccacaagcggaagtattctacctgattccagagttcattccaacatgcagtagaatgaggtgaatgaagaaccaagtgtgggttttgttttcacagtgcacttggtcaatctagtttctctgagtagtgggctgtattctaagaaaagctttcacgtagacgtcaaagtctgcaaaagagatgagttagccactttacaaaaacctgctctgctttacaaaagatgcacaccaggcttcctttacaagtgaactccaaggctgcttgtaaagtaccacccttcctgcagactttgtgggtcgtgtcacttggcctaaacaagtggcctaacatatgcatgctcacagctagtagcatccctcatgcgtcctttgtcatactctggaaagaaaaaaactctgctatcttcagagaaaccatctattcatacttaaatatggaagcctttacaaggaactcaaaatacatttcatttcatttgtacaatgagaaaaaagatgaaaaggcaaggttgttattgcagttgacattgtcagccctgccttttggctttatgtaatttaaaatagaaagggggaaggaggacaagacagaagctcaactttagaaaccatggacatcacctccctctttgagaggagctgcttgtgaaccaggctccagtcttcctgtggcctctcacagtaaccctgcccctttcttacctcacaggggcaagagggactctaaagagggcgtaagcaatagaggcacctgcagccctccttcctcagcaggaaatcaatgtggagccccagagggacattttatctcagagagagcatgctggccacaggacccagtgcagccctgcttcctgcaccgtgggtctttcctgatagctgcaggcttgagattgcagcctcaggataggacacgttcagatgccttccagactacacacactatgcttagattcgagagtctttcctgaccttaaaatttgtcccttgcttactttcacactgcagaagatttatatatatattcatcattatttttgcagcagtacaagtggaaacttcaaaaaaatcattccctttcatgtcctggtctttttaagtcttgatatgtaaccattttcataaatatccaaacagagattgtcattccccttaaaaacagaaacaaaacacaaaactagtgcttgtgaaaacacacagcgcaaagacaattatcctattgcattaaaaaaaaaaatcagtctgcctagagacatttcattggctgcattgtcttaattccctaacgaaactgcatcaaaatgtcagttgtaatttagcctctgatcagctgttaaatattatttaaatatttacaggtcctgtggggtatctcccattacccatgtcgccctcaaattacataagcgatcataaaataagaagaaaaaaaaaggtctttagtagatcacagcagagttaccactgataagagtgttggctttgttcagttgtttttaaattaccagccgtcaagcacagtagcccctaaaaccaattttgagcaaggataaattcaactccctcatctgagaaccttgactttccagttgccttgaagtattgggaatagtaactgtacattttcaatttaattatttggtattttatttgactgtcttggccatgtcattttatggaagcatttttaaatagcactttttgttagtggtgtggaatttctgcggttattttttttttttttttgcaacagatgaagcaaaaaaaaaaaaaaa

SEQ ID NO: 1000 - protein, 111 aa, Human
MHTRLPLQVNSKAACKVPPFLQTLWVVSLGLNKWPNICMLTASSIPHASFVILWKEKNSAIFRETIYSYLNMEAFTRNSKYISFHLYNEKKDEKARLLLQLTLSALPFGFM

SEQ ID NO: 1001 - DNA, 2357 bp, Human
gtcagtgccaagaatgacatcaaagtaaggaatatctttctctctaccccaggaagtagctcaaggctggtgtagagagaaagatattccttactttgaagtcagtgccaagaatgacatcaatgtggtgcaagcgtttgagatgctggccagtagggctctgtcgaggtaccagagcatcttagaaaatcacctcacagaatccatcaagctctcgccagaccagtcaaggagcagatgctgctgacctccagacgcctgctctggaagcccagaaacagagcctgccccgagcctggtcaccccaggcttgagaacaggtgaccatccccctccagccccactgcctgcccaagcacagtgcagggggcctaagctctgcggcagagcccttgaccctggtgctgggcccagagtcagagggcagcccctggctcaggctgagtatagtgagagcgtctggatgaagcccggaatgtcagagccaaaccctggtcctgcagaagtcacagtttccgcagtggctccagctttccccacccatccacccctcaaacactcccgctccagaacacacatctccgcagaccggccactgattggagtctggttacatcctcctgtggacagaccttcctcacccgctcccacctcacacccctcagccacaagcaaagctttggacaatggcacagctcagcctccttcaacgagcagactaaggagtaaaggtctggaccccacatgctgggcccgcctcagctcctggcagaagctgtcgtgcctgagaccccctctgctccctccagggtagaagactgagggagcacaggagaagccacaagggaccatggctcattcctccttgctgggtgctcaggcaactcacataaatctctgagtctcaatttgtttatctgtcctgtgggggtgagatgtgccttgccccctgtatcacagtgtggttttgaggaccagaagctgtgcttaaatccagtagctgttgtcaatatgcatttatttacttctttgacaagtttatttttgcgtatctactatgtacgatgcattgaagtccagtgacaaacaaaacacagggactctgccctcctggagccgacatctggtgagggagagacgcagactctagacagatatttccaaatagcaggtaagtgctataaacaaagggaaacagggtaatgggatagagtgacagggggtgggatgagttgctattttagatgaagtggtccaggagggcttccctgaggaggtggcatttggtctgagggctagagaatgagaaagcagctgtcacctgagagctggagaaagaacattccagggagagggagcatcaagacccaaagccctgaggcaaaaacaagcttgccatgttccaggaacagtgaaaggacatccattgacctaatactcaaagctgctgtcccaaagacaaagcaaaggggacccagctcccttgggtggctcctagatgctctgctgcctgaccaccagagggcagcagtgctccttctcttccaggctgagcagaaagtggatgctcatgaacgttttaggagctggggttttgtccttcagatgctcaaagcttgttcatgggcttggaggcatgtttagccctttgggatttgtaaggcagagaattccaatttcttaagcctagtaagaaatgagcaaaaacttcaatatatatgactcaggcaagaaatcagcatctgtggcaaatactagaatgaaatgcaagaaagctcactgcaaggagtctccctccctgcagattccaaggctggaatctttttcttctggctccaggcagcacagacagggcctagcctggagagggtggacaagatgtcctctcagggtcttcaatggccaagtccaagcccactgcagaatctttctgtctacccgtaagtatcctttcctgagttccaggcaaagctggggatgttagcctatgactgtcatctgacttggaaggtacacctaggggccggggggaggtcagcaggggagtttgggagccacttctccccccacgtggcactggagtgtgaactggctcattctggacaccagcatggagccagcacgggaacaggggggcagcctagagcacaagctctatctgtgtccttcagagctcctgggaaacatgatgcgccctcatgggaatggcattttgcatatcacacaggctgtcctgggagtcaggcagactggattgtcacgtgcggtgtgcatgcagcagcttgtgcactgcagtggacctgtggaccatttctaaaggtgcacaacaaataataaatgtgtccttctttgttttt

SEQ ID NO: 1002 - DNA, 429 bp, Human
tatagagacatccagcacactccatttaaaaaaaaggggggaaaaaggtaaaaaacaaaaccccagaaaattgcaaagttctgttactgttgtggtacctggcaccgttttttaaaattagcttctgaatcatcatctggaaagaaaacattctagaataacatcattaaaaacagctctgataaagcacggtcactactacgtatcataaagcaggtacaagatattttacattcacagaggtatgatacagtactgtcctatatctataatactagaggatacaattaaaaaggcattatttgagacttgattctacttttccagcagagggcccaaaggatggcatgacacagctctgtaaagaaatgcaccttcttaggatttcctttaattagtggcacagttctaggtactcactgttcttca

SEQ ID NO: 1003 - DNA, 412 bp, Human
gactagtaccgattattggcaattggtaattgataattggtaagagtagtaccaaatagtgggcatttttcttaaaatacatacctctaccccaaaccccaaatgttaatttagaatcctgaaacaggcaggtcaggctctgactcttttgtttaaggaaatgtaatactgtgtcaactaaactggcattaggttcttagtggagtgtgtgtttgtgtgtgtgtgtgtgtgttttgtgtagaggtatgtttgtgatgaaaggttttgcactgttgcataaagaagtttgattttgtgatttttaaaatgatattcatttggagactttttaaggtaatttaaaagatgtataatttccgtgtgtttaatgaaatctgttgtcgatgtactaatcttggtttacagcatcttg

SEQ ID NO: 1004 - DNA, 769 bp, Human
aaaaaaaaaaaagcttacaatctgactggaagatgtcaaaacctgtgaaaagctaattagcagtattaagcaacacaaacattagtgccaaatgcatgataaaggctaaagaaggccagagcatatattactgtagagtagaatagtaagggaagactttgtcctttagtaaagagataggaggtggcctggcccttgaaatagtagtgtttaggtagatgcttgtgtaggattcctgataagagcaactgaaaagaaggagaggggaagtagtaaagggacaagaaacaattttttttttgaggaaccataagcaaattatagtttgacaagacaagattgggggacatatatggttaccagggaattacctcttatgtgttatatctttatattatttatctctggaaaagagtaccctgcaaaattccctacagctgcaagcagatgtcacttgatggacagagggggaattctgcccctccggtatcgggaaatacatactaaagacattgcgaaacgctgaacctcttcccataaataaaaggtttgtttgtaaaatgggaaatccacccataataaatgaacaataggcactgccagtttaggcctgttcatgaatggatctgcaagacagcatcttcgtttaacaacattatctgtgatttgatacatttatccttattacaatattgtttagttggtagaaattctatgttttctacaaggaaattgatgtttattaaataaaactgaaaataattaaaaa

SEQ ID NO: 1005 - protein, 55 aa, Human
MNNRHCQFRPVHEWICKTASSFNNIICDLIHLSLLQYCLVGRNSMFSTRKLMFIK

SEQ ID NO: 1006 - DNA, 535 bp, Human
  unsure 103: unknown base
tatcccagagagtttttgagcatatgggtagtgtttgtgaatttaagtttgttccccacattgtcagtttattctaaaattatcaccattttagacttaaagnaattttaaagccaaaagataagcaaacagacttgcttaggtcctgtagcaaattaattcagaccttgaacaacatttcattgtgctgtttaggaagtgttaagtatattgagattttccatattactgtgttactatcatacttaaattttagaagatgatcaaattattttaatgactaggactatgcttatgaagttagcatttcctgcccttatttatagaaagcacttgatatatttcacaaaggtgaggagattaactttttagggaacaagtcatttaaattcttgaaccagtttccatcttttaggctatatgagtattgaatataggagaaaagagaaaagtatgcatgtttctcaaaggctctttctttaaatgtcaccagcagatctaaacagtatccataggcacctatggcaaatttact

SEQ ID NO: 1007 - DNA, 515 bp, Human
  unsure 71: unknown base
  unsure 74: unknown base
  unsure 75: unknown base
  unsure 77: unknown base
  unsure 78: unknown base
  unsure 79: unknown base
  unsure 80: unknown base
  unsure 81: unknown base
  unsure 82: unknown base
  unsure 83: unknown base
  unsure 85: unknown base
  unsure 86: unknown base
  unsure 87: unknown base
  unsure 89: unknown base
  unsure 90: unknown base
  unsure 91: unknown base
  unsure 93: unknown base
  unsure 94: unknown base
  unsure 95: unknown base
  unsure 96: unknown base
  unsure 97: unknown base
  unsure 98: unknown base
  unsure 99: unknown base
  unsure 100: unknown base
tgggcccgagggttttttaagcatgacccagcattgggggctcaaaagatgggggccgtggaaaatgtganaannannnnnnncnnngnnnannnnnnnncagggtgtttttcctgaatgtgccatttgattccatcatggagcggctgactctgagaagaattgatccagtcactggggaaaggtaccacctcatgtacaagccacctcccaccatggagatccaggctcgcctcctgcagaacccaaaggatgctgaagagcaggtcaagctgaaaatggacctgttctacaggaactcagctgacttggagcagttgtatgggtcggccatcaccctcaatggggaccaggacccatacacagtcttcgaatacatcgagagtgggatcattaatcccctgcccaagaaaatcccctgatgggttcagagccaggagcgctgccccagggaaagagttaatcccctgcccccagccccccagcctcggcacagctcccctaaaaagccaata

SEQ ID NO: 1008 - DNA, 1470 bp, Human
ggattaatctaagcttctgctgtgtatggacctgtggctacattacaaaattcagttgtgaagctataaaatcaattagtctagacctcaaatcttatttcctatgaaaagcctcaaacttgtagctgtatgaacaagtgtttttggaattttttttttttgctagaatggagagaacacactggagatcacaaatgcatttattctttttcaccaactgtttcattggccttaaaaaatactaggctaaacttaagtggtaaagatctgaaataaaaagatgcatctttatgtctgaacagcaatttttcataggtctctaataacttgcatttccttatctatggataaggagatctgaaattgatctacattttctttagtaatgttttctctgtttattgagaacagatatcttcatctccttcatgcattatccttagtaacagatgtcagtaggatccagagccattttggaactttaccaaggattaaggatgagcacagatcacatcaagagtctaaatatcactttggaggccatgtgcagatcagatttggaagtgaccaagactggaggcagggacaccagagttttctgttaaaaactggtccatgcaagaaaagatgactcctgaaataagacagtgatcattaggatgaagaggaagagaagatttgaggaatacttagaacagaatttactgaatttactggttgaattgaatgtgaagaggagatgaataaagaagaaaacaccctcaaaggaacaaatatgaaacaatctctggaaaatggaatttgattttgattcaacaacaggagaattctactgtttttctccagcagctccacgataaaagggaaccctgagcagaacacatgcacaaactcatgccataccctaagggacaaggttccccacatctacttggaaatctttgggatgctcaatggagaaaaacaaggagagaaaaatctaaacccagcagaagagaaagtttaagaaagcggtcgtcgccaataccaaaattagctatgatattcaggaagaaaaaaatggaaacacgataaccacagtcaataaagaccaaggccacattccattgaccagagctcagccacgcgccacacctggctaaagagactctggctgaagaattccctgaatattttaatgtagctctaggttataacacagaacaaccacaaggtggcagaagaactccattcttgtaaatctcttagttgcttctttatttcatcttccctattccatctaatgttccctgaattttactattttgttggtttgaaaatatgtgtgacttacgtcctttaaaggatttggttcgtaaggttttgaatagactggaatataaaacatttatagaaaagaaaaatacctacagtatgatgttagtgaactattaataatccaattaaataaaatatatttgctttggattt

SEQ ID NO: 1009 - protein, 81 aa, Human
MFSLFIENRYLHLLHALSLVTDVSRIQSHFGTLPRIKDEHRSHQESKYHFGGHVQIRFGSDQDWRQGHQSFLLKTGPCKKR

SEQ ID NO: 1010 - DNA, 145 bp, Human
ttatcttatgatttatttgtgtacttattttcagacggagtctcgctctgggcggggcgaggcgaggcgaggcacagcgcatcgctttggaagccgcggcaacgcctttcaaagccccattcgtatgcacagagccttattccct

SEQ ID NO: 1011 - DNA, 3552 bp, Human
ggagacggtgttaatgatagccatccagctgctttctcgaatggaatacgtgcactcaaagaacctcatttaccgagatgtcaagccagagaacttcctgattggtcgacgaggcaataagaaagagcatgttatacacattatagactttggactggccaaggaatacattgaccccgaaaccaaaaaacacataccttatagggaacacaaaagtttaactggaactgcaagatatatgtctatcaacacgcatcttggcaaagagcaaagccggagagatgatttggaagccctaggccatatgttcatgtatttccttcgaggcagcctcccctggcaaggactcaaggctgacacattaaaagagagatatcaaaaaattggtgacaccaaaaggaatactcccattgaagctctctgtgagaactttccagaggagatggcaacctaccttcgatatgtcaggcgactggacttctttgaaaaacctgattatgagtatttacggaccctcttcacagacctctttgaaaagaaaggctacacctttgactatgcctatgattgggttgggagacctattcctactccagtagggtcagttcacgtagattctggtgcatctgcaataactcgagaaagccacacacatagggatcggccatcacaacagcagcctcttcgaaatcaggtggttagctcaaccaatggagagctgaatgttgatgatcccacgggagcccactccaatgcaccaatcacagctcatgccgaggtggaggtagtggaggaagctaagtgctgctgtttctttaagaggaaaaggaagaagactgctcagcgccacaagtgaccagtgcctcccaggagtcctcaggccctggggactctgactcaattgtacctgcagctcctgccatttctcattggaagggactcctctttgggggagggtggatatccaaaccaaaaagaagaaaacagatgcccccagaaggggccagtgcgggcagccagggcctagtgggtcattggccatctccgcctgcctaaggctctgagcaggtcccagagctgctgttcctccactgcttgcccatagggctgcctggttgactctccttcccattgtttacagtgaaggtgtcattcacaaaaactcaaggactgctattctccttcttccccttagtttactcctggtttttaccccaccctcaaccctctccagcataaaacctagtgagctaaaggctttgtctgcagaaggagatcaagaggctgggggtaaggccaagaaggtaggaggaaaatggcagacctgggctggagaagaaccttctccgtatcccaggtgtgcctggcagtatggtttcctcttcctctgtgcctgtgcagcattcatcccggctggccttggggttcaggttccttcttccctccctcctgtgaagttacactgtaggacacaagctgtgagcaatctgcagtctactgtccccgtgtgtaggcgttcttagcttttttgacaaactcttttctccaggtagtaggacaatgaaaattgttctaagcaaaggaaagaaaactgactttgttgcacttttagtttttttaaaaaaaacaaaaacaaaaacatggcagatgcatattgtgtctggttatattgggggttttacttttacctgttttgagggggatggggccggccaagccattcagagagaacatgggtccagaggacattctcagtggaaagagtttgatctgcagcacccagaagagaagccaaactcggtgtcattctgagtgaacactcaggttggcaagaaaacatacttgaattttcattcatcttctcagcagctgaagaatgtccctgccagagcatcttgacctaatcagcttacagtttgaaaacctagctctccagaacatgagatgagccagccgagccagactgtgaccaggaaacagctcatcccagagaaggagatgcttaacaaaaaaaaattgaaattgtttcccatgctgccagggacttccaactagatagccatgtgacgtcctggtgacttgagggaaaaattagtgatgaaacagccaccaccatattgccattagtgaaaaaaaagaggacagtgaacctgccttccacctgccagagggacctcagggtgtggcattatagggccaggaaaagaaaatcggtgtatcctatctgccccaatagctgagctgtagcatttgggctggcctgccttatcagaaaccaagcttatgaagatcttctcccagcaggtccatagcagtaggcttaggatgcagtatatggggccgcatttaaaaggagggaaagattgtttggtgctggaacattccagggaaaaggagactggaatgaaaggtctgaaattatcttctcaattggactccttccagaaaggtggccgtgcctctaagcatgtttttcccagtatgccctaggcctccccccatggtgttttcatatgaggtacaactgtgaaggatctggttcctcattcactgtttgacaagtctttcatgtgtggagttactcttctcatgcccaattttcatttgagtttagtggcttaaccaaacaatgactcctcattccagcggtgacagaagagaaagggtcatttacatcaggaaagaggtcttgtatctgggagtagagagctaaccatggagcacagtggctggtgggtgacttagtctgatggtttgtggaccatagaagtcttcacctctggtttgaggtgcagggctgtcttttgtactggagggtgtggggatattttctgatagttgccatttcttgaaaaattcccttgatgtaccttacacagagcagaaataacattaacatggatcagaggtactgggcttcatctgttccattggaccttggctagggaatatcatttcactggcatcaaacctgcttagcttatgaaaagatggtaatatgtcatttctataaatgtttctatatatgaaacataaagtggcagggagatacaatatcacaccccttccccacaaggactgtgaatattgggatttatgtccttgccattacctagtggttacagccctatcactaaaatttacatcgtttctcagttgggatttgggcattgctaacttactgtatagaaagtttaacttttcctcacccctgtatagaaaatgccttgcctctcaagagagggcagagggggggccaggtgcagtggctcacgcctgtaatcccagcagtttgggaggccaaggcaagtggatcatgtgaggtcaagagttcgagaccagcctggccaacatggtgaaaccccgtctctacaaaaaatacaaaaattagctgggcatggtggcatgctcccgtagtcccagctactcgggaggctgaggcaggagaatcacttgagcctgggaggcagaagttgcagtgagccgagatcgcaccactgcactccagcctgggcaacagagtgagactctgtctaaaaaaaaaaaaaaaaa

SEQ ID NO: 1012 - DNA, 1766 bp, Human
tgccagacctcactctggccttgctgcttctctccagctcctgaacttttctttcttccatcatgctctgagcccattccttgaaaactaaaaggtccctgactcccagtctgcagccatcctgggcctgctgagctctgattcaagtgcctgcctctgccccttggtgggctgaagcttcatggaggtatccaccaacccctcctccaacatcgatccaggcgactatgttgaaatgaatgattcaatcacccacctaccctctaaagtggtgatacaagatattactatggagctacactgccctctgtgcaatgattggttccgagacccactgatgctaagctgtggccacaacttctgtgaagcctgtatccaagacttttggaggctgcaagcaaaggaaacattctgtcctgagtgtaagatgctatgtcagtataacaactgtacattcaaccctgtactggacaagttggtagagaagattaagaagttacccttactcaagggccatccacagtgcccagagcatggagagaacctgaaactgttcagtaaaccagatgggaaactgatctgctttcaatgcaaggatgctcggttgtctgtggggcagtctaaggagttcctgcaaatctctgatgctgtccatttcttcagaggagcttgccatccaacagggtcaactggagacaactctgaaggagcttcagaccctgaggaacatgcagaaggaagctattgctgctcacaaggaaaacaagctacatctgcagcaacatgtgtccatggagtttctaaagctgcatcagttcctgcacagcaaagaaaaggacattttaactgagctccgggaagaggggaaagccttgaatgaggagatggagttgaatctgagccagcttcaggagcaatgtctcttagccaaggatatgttggtgagcattcaggcaaagacggaacaacagaactccttcgactttctcaaagacatcacaactctcttacatagcttggagcaaggaatgaaggtgctggcaaccagagagcttatttccagaaagctgaacctgggccagtacaaaggtcctatccagtacatggtatggagggaaatgcaggacactctctgcccaggcctgtctccactaactctggaccctaaaacagctcacccaaatctggtgctctccaaaagccaaaccagcgtctggcatggtgacattaagaagataatgcctgatgatcctgagaggtttgactcaagtgtggctgtactgggctcaagaggcttcacctctggaaagtggtactgggaagtagaagtagcaaagaagacaaaatggacagttggagttgtcagagaatccatcattcggaagggcagctgtcctctaactcctgagcaaggattctggcttttaagactaaggaaccaaactgatctaaaggctctggatttgccttctttcagtctgacactgactaacaacctcgacaaggtgggcatatacctggattatgaaggaggacagttgtccttctacaatgctaaaaccatgactcacatttacaccttcagtaacactttcatggagaaactttatccctacttctgcccctgccttaatgatggtggagagaataaagaaccattgcacatcttacatccacagtaatgagtcataatattatacaaattcagagtgttattaaagaggttttgaaatatttaaaaaaaaaaaaaaaaaaaaaaaaaaaaa

SEQ ID NO: 1013 - DNA, 410 bp, Human
  unsure 183: unknown base
  unsure 185: unknown base
  unsure 186: unknown base
  unsure 187: unknown base
  unsure 188: unknown base
  unsure 189: unknown base
  unsure 190: unknown base
  unsure 191: unknown base
  unsure 192: unknown base
  unsure 207: unknown base
gtttttctccagcctacaaatgcaaatgagaaaacacagctaatcaaagaaggatctcgaagttattgcacagactcttgatattgagccctcagagagtccacagtccctcctctcagttcagtcttgtctccagatggtcgtaggggagcgtgtggggcataaagtgctgtgaacttttcnannnnnnnnttttatttttgggtnaggaaaacatgattgctatataattttctcagtatgcagactttctctctgagtagaatttcttatgaaacacattcaatttgggtgaataaaggcctgaagagttattttaccctccttgcctgatgtaggacagtggaattgtacagcctttatgaacctgccctttatgtgtggcggatctgattcctaactgaccaaag

SEQ ID NO: 1014 - DNA, 6204 bp, Human
atggcggcgtctgtggtttgaattccagcggcgccgccagagtctgaacaagagctggggtggagggggcggggacctggggagcccggcgggtcgctatcgcggggggtactagtggcgccgccgccacagacaccaacgctgtcgccacctctgtagccatgatggacttggtgttggaagaggacgtcaccgtccctgggacgctcagcggctgcagtggccttgttcccagtgtaccagatgacctggatggcatcaaccccaatgctgggttgggaaatggtctgctcccaaatgtgtcagaagaaacagtgtctcccaccagagcacggaacatgaaggactttgaaaatcaaatcactgaattgaagaaagaaaactttaacctaaagctccgcatctatttccttgaggaaagaatgcaacaggaatttcatggccccactgaacatatctacaaaactaacattgagctcaaggtggaagtagaaagtctgaagcgggaactccaggagagagagcagctgctcatcaaagcctccaaagcagttgagagcttagctgaagcaggtggctctgaaatccagcgggtgaaagaagatgctcgaaagaaggtgcagcaggtggaagatctcctaactaaaagaatactccttttggaaaaggatgtgacagccgcccaggcagaactggaaaaggcctttgcagggacagagacggagaaggctcttcggttgcgtttggaaagcaagctttcagagatgaagaagatgcacgagggggacttggcgatggctctggtcctggatgagaaagacagactgattgaggagttgaagctgtctttgaagagcaaagaagctttaattcagtgccttaaagaggagaaatctcagatggcatgtcctgatgagaatgtgtcatctggagagctccgaggactttgtgctgctccaagggaagaaaaggagagagaaactgaggctgcacaaatggagcatcagaaggagagaaacagctttcaagagaggatccaggcacttgaagaggacctgagagagaaggaaagagaaattgctacagagaagaaaaatagtctaaagagggataaagccattcagggtttaaccatggcattaaaatcaaaggaaaaaaaggttgaagaacttaactctgaaattgaaaagctcagtgctgcctttgctaaagccagagaggccctacagaaagcacagacccaggaatttcaggggtctgaagactatgagactgctctatcaggaaaggaagccctttcggctgcgctgcgctcacaaaacctcaccaagagtacagagaaccacagactgcgtagaagcattaagaagatcacccaggagctgagtgacttgcagcaggagagggagagactggagaaggacctggaggaagcccatcgagagaagagcaaaggagactgcaccatccgtgatcttagaaatgaagttgaaaaattacgcaatgaagtgaatgaaagagagaaagcaatggaaaatcgttacaagagtcttctgagtgaaagcaataaaaaattgcacaatcaagagcaagtgatcaaacatctaacagaaagtaccaatcagaaggacgtgttgcttcagaaattcaatgaaaaagatttggaagtaatacagcagaactgctatttaatggctgcagaggatcttgagctcaggagtgaaggcttaataacagaaaagtgctcttctcaacagccaccaggcagcaaaaccatcttctctaaggaaaagaaacaatcatcagactatgaagagctgattcaggtcttaaagaaagagcaggacatctatacccatctggtcaaatctctgcaggaatcagacagtatcaacaacctgcaggctgagttaaacaagatttttgccctgcggaagcaactggagcaggatgtgctttcatatcagaatttgcggaagaccttggaggagcagatcagcgaaattcggaggcgggaagaagaatcattttcactttatagtgatcaaacatcttatctaagtatttgccttgaagaaaacaatcggtttcaagtggaacatttttctcaagaagaacttaagaaaaaggtcagtgaccttatacagctagtgaaggagctgtatacagacaaccagcacctgaagaaaaccatttttgatctctcctgcatgggtttccagggaaatgggtttccagatagacttgcgtctacagaacaaacagagcttctggctagcaaggaggacgaggacacgatcaaaattggggaggatgacgagattaatttcctgagtgaccagcatttgcagcagagtaatgagattatgaaagacctttccaaaggaggctgcaaaaatggatacttaaggcacacggagtctaagatttcagattgtgatggggcccacgcacctggctgcctagaagaaggtgcattcataaacctgcttgcccctttgttcaatgagaaggccacattattactggaatccaggccagaccttctgaaagtggtacgggaactgcttctgggacaactattcttgacagagcaggaagtttctggagaacaccttgatggtaaaactgagaagacacctaagcaaaaaggtgaacttgtacattttgtccaaaccaactcattttccaagccacatgatgaactgaagttgtcttgtgaggcccagctagtaaaggcaggcgaagtgcccaaggtaggactgaaagatgcctcagtgcagactgtggccacggagggcgacctgctgagattcaagcatgaagcaacaagagaggcttgggaagagaaaccgatcaacactgcactcagcgcagagcatcggccagagaacctgcacggggtgcctgggtggcaggctgccctcctttccctccctggtattaccaacagagaggctaagaagtcccgcttgccaatcctaataaaaccatcccggtcattaggaaatatgtatcgtctccctgccacccaggaggtggtgacgcagctgcagagccagatcttggagctgcagggggagctgaaggagtttaaaacttgtaataagcaacttcaccaaaagttaattctggctgaagcagtgatggaggggaggccaacgcccgacaaaacgttgctgaatgctcagccccctgtgggagcagcctaccaggacagcccaggagagcagaaaggaattaaaaccacatcttctgtctggagagacaaggaaatggacagtgatcagcaaagaagctacgagattgactctgagatttgcccacctgatgaccttgccagcttgccatcatgcaaagaaaatcctgaagatgttctgagcccaacttcagtagctacttacctgagttccaagagtcagccttctgctaaagtcagtgtgatggggactgatcagtcagagagcattaatacctcaaatgagacagaatacttaaaacagaaaatccatgacttggaaactgagctggaaggctaccagaatttcatatttcagcttcaaaagcactcccagtgcagtgaggccataattacagttttgtgtgggacagaaggggcccaggatggcttgagcaagcccaagaatggttctgatggggaagaaatgaccttttcaagtttgcaccaagtgcgatacgtgaaacacgtgaaaatcctcggtccgctggccccagagatgattgacagcagggtgctggagaacctcaaacagcagctggaggaacaggaatacaagctgcagaaggagcagaatttgaacatgcaacttttcagtgagatccataatctgcagaataagttcagagatctctcacctcccagatacgattcattagttcagtcccaagccagggagctctcccttcaacggcagcagattaaggatggccatggcatctgtgtcatctcccgtcaacacatgaacaccatgattaaggcatttgaggagttgctgcaggccagtgatgtggattactgtgtggccgagggtttccaggaacagctgaatcaatgtgctgagctgctggagaaattggaaaagctatttctcaacggaaaatcagttggagtggaaatgaacacccagaatgaactgatggagaggattgaggaagacaacttaacctaccaacatcttctgcctgaatctcctgagccttcagcctctcatgcgctctctgattatgaaacatctgaaaagtccttcttctcacgagaccagaagcaagataatgagacagagaagacttcagttatggtgaacagtttttctcaagacttactaatggaacacatacaggaaattcgaactttgagaaagcgtttagaagaatctattaaaacaaatgagaagctacggaaacagttggaacggcaaggatctgaatttgttcaaggttctacaagcatttttgcttctggttcagagcttcatagttctctaacatcagaaattcatttcttgaggaagcagaaccaggccctcaatgcaatgctcattaaaggatccagagataaacagaaggagaatgacaaattacgagagtccctctccaggaagaccgtgagcctggagcaccttcagcgggagtatgccagcgtgaaggaagaaaatgaaaggctgcagaaagaaggcagcgagaaggagagacacaaccagcagctgatccaggaggtccgctgcagcggccaggagctgagcagggtgcaggaggaggtgaagttgaggcagcagctgctctcacagaatgacaagctattgcagtctctccgagtggagctgaaggcgtatgagaagctggatgaagagcacaggagactgagagaggcgtcgggagaaggctggaaggggcaggatcctttcagggacctgcacagcctcctgatggagatccaggctctgcgcttgcaactagaaaggagcatcgaaaccagcagcactctgcagagcaggctcaaggaacagctggcaaggggggcagagaaggcacaggaaggagccctcactctggctgtccaagccgtgtccatccctgaggtgccccttcagcctgacaaacacgatggtgacaaatatcccatggaaagtgataattcatttgatctgtttgattcctcccaggcagtgacaccaaaatcagtttcagagactcctccactctctgggaatgacacggactccctctcctgcgacagtggcagttcggcaactagcactccgtgtgtgtcccgcctggtcactggccaccacctgtgggccagcaagaatggccgccatgtcctgggcctgattgaggactatgaggccctgctcaaacagatcagccagggacagaggctccttgctgaaatggacattcaaacccaagaggctcccagctccacaagtcaagagctgggaacaaagggtccacacccagcaccactgagcaagtttgtgagcagtgtgagcacggccaagctgaccctggaagaggcctacaggcggctgaagcttctctggagagtctcactccccgaggatggccagtgcccccttcactgtgagcagattggagaaatgaaggcagaggtcaccaaactacataaaaaattgtttgaacaagaaaagaagttgcaaaacaccatgaagcttttgcagctgagcaagcgccaggaaaaagtcatctttgatcaattggtcgtaacccacaaaatccttcggaaggccagaggaaacctggagcttaggcctgggggagcccatccaggaacatgcagtcccagcagaccaggctcctgagaagaactttcagccaataaagcttgtgcttcccccaccgagctcacgctgtctctttgttccaagtgtggttcctatttattgaggaagaaagagctgtctggccaaaggaaatctattttttcccttcatgttttctctctgaaagttggcttgagagttgttgtcagaaaggtgcaggtgctccacaaacgggtggtaaaaaggcctcgagctcttggatgttgtatttcagatcaggggcaggcaccggagttgaggctgtgcgccttggtgggcttcacgtcttcccctggatttgcttagtactcagccagtgccacagtttgaagattctcattaaatgattcatttcatttca

SEQ ID NO: 1015 - DNA, 2009 bp, Human
cagttaccttcctggtgtcattgccatcctgggttgacaagctgagagtagaggatacaagtgatgtgaataaaatggaaattgcattgtgcagaagaagaaacaactggaagcagaatcacatgcagcccaactacagattcttatggaattcctcaaggttgcaagaagaaataagagagagcaactggaacagatccagaaggagctaagtgttttggaagaggatattaagagagtggaagaaatgagtggcttatactctcctgtcagtgaggatagcacagtgcctcaatttgaagctccttctccatcacacagtagtattattgattccacagaatacagccaacctccaggtttcagtggcagttctcaggctggagtgcaatggcgctatcttggctcactgcaacctccacctcccaggtacaagcgattctcctgcctcaccctcccaagtagctgggattaccggcgcctgcctccacacctgacaaagaaacagccttggtataatagcacgttagcatcaagacgaaaacgacttactgctcattttgaagacttggagcagtgttacttttctacaaggatgtctcgtatctcagatgacagtcgaactgcaagccagttggatgaatttcaggaatgcttgtccaagtttactcgatataattcagtacgacctttagccacattgtcatatgctagtgatctctataatggttccagtatagtctctagtattgaatttgaccgggattgtgactattttgcgattgctggagttacaaagaagattaaagtctatgaatatgacactgtcatccaggatgcagtggatattcattaccctgagaatgaaatgacctgcaattcgaaaatcagctgtatcagttggagtagttaccataagaacctgttagctagcagtgattatgaaggcactgttattttatgggatggattcacaggacagaggtcaaaggtctatcaggagcatgagaagaggtgttggagtgttgactttaatttgatggatcctaaactcttggcttcaggttctgatgatgcaaaagtgaagctgtggtctaccaatctagacaactcagtggcaagcattgaggcaaaggctaatgtgtgctgtgttaaattcagcccctcttccagataccatttggctttcggctgtgcagatcactgtgtccactactatgatcttcgtaacactaaacagccaatcatggtattcaaaggacaccgtaaagcagtctcttatgcaaagtttgtgagtggtgaggaaattgtctctgcctcaacagacagtcagctaaaactgtggaatgtagggaaaccatactgcctacgttccttcaagggtcatatcaatgaaaaaaactttgtaggcctggcttccaatggagattatatagcttgtggaagtgaaaataactctctctacctgtactataaaggactttctaagactttgctaacttttaagtttgatacagtcaaaagtgttctcgacaaagaccgaaaagaagatgatacaaatgaatttgttagtgctgtgtgctggagggcactaccagatggggagtccaatgtgctgattgctgctaacagtcagggtacaattaaggtgctagaattggtatgaagggttaactcaagtcaaattgtacttgatcctgctgaaatacatctgcagctgacaatgagagaagaaacagaaaatgtcatgtgatgtctctccccaaagtcatcatgggttttggatttgttttgaatatttttttctttttttcttttccctcctttatgacctttgggacattgggaatacccagccaactctccaccatcaatgtaactccatggacattgctgctcttggtggtgttatctaatttttgtgatagggaaacaaattcttttgaataaaaataaataacaaaacaataaaagtttattgagccacaaaaaaaaaaaaaaaaaaaaaa

SEQ ID NO: 1016 - protein, 506 aa, Human
MEFLKVARRNKREQLEQIQKELSVLEEDIKRVEEMSGLYSPVSEDSTVPQFEAPSPSHSSIIDSTEYSQPPGFSGSSQAGVQWRYLGSLQPPPPRYKRFSCLTLPSSWDYRRLPPHLTKKQPWYNSTLASRRKRLTAHFEDLEQCYFSTRMSRISDDSRTASQLDEFQECLSKFTRYNSVRPLATLSYASDLYNGSSIVSSIEFDRDCDYFAIAGVTKKIKVYEYDTVIQDAVDIHYPENEMTCNSKISCISWSSYHKNLLASSDYEGTVILWDGFTGQRSKVYQEHEKRCWSVDFNLMDPKLLASGSDDAKVKLWSTNLDNSVASIEAKANVCCVKFSPSSRYHLAFGCADHCVHYYDLRNTKQPIMVFKGHRKAVSYAKFVSGEEIVSASTDSQLKLWNVGKPYCLRSFKGHINEKNFVGLASNGDYIACGSENNSLYLYYKGLSKTLLTFKFDTVKSVLDKDRKEDDTNEFVSAVCWRALPDGESNVLIAANSQGTIKVLELV

SEQ ID NO: 1017 - DNA, 2551 bp, Human
  unsure 2539: unknown base
tgtttttctgctcttcttaatttttttaaagattaaaaacaaagaaatcttgttccgggaccctaatgaaaaaaaatttcaaatcttttcagtttgtccatgaccaaagagttgctttaataggaaaaaatctgttcttatccctgtcagatttatggttaatgggtttgcaacggcaaggaggcaaggaatggttctatttctgacagagcagcctgcatctgctttatgctgtctggagggaagtggtctgaggcaggctcacccgtggaagtgctcacgtattctgtattatttttctacactggagctgagattcttctcttcacagccttgcagagtaagtcagtgcctacaagtgtaagaaggagctgtaatcttcatgaggatggttatacttcagtattcttaaagagaacatgaacatttttgagctgtatgttcttagggacaactgtgcttcgatgtggtcagtctcgtcacttgtgagtagctgtgaaatctttagtgtgcatgtgtttgcacctctgtggtctgtcaacgtggctgtcactgaaggagcaagagaccatcttttaggaaccctgccaccaaataataatatatccaggcttagactttggattaatgttaaatgtacatttttttggttcagtacctgaagaagaatactgaaacttgaatctataaattcctatggacccttttaatattaaacacaacaaattaaaagttgttataggtaaaataagttcagataaaatagtggtggtatttaaaataatattgctgaagtgcagattgaaatactttttaaacaactgaagttctgagtttttatagggaatttcatgtaacaagactggtttagaaacgtaaagttgcgcagtcaacataaataaatacagaatgccatgtttcccacttctaagtaaagacagtgggcagcttctgtttctccttctatcaaggcttcaccctatcttaaaggtctgtggtgcctcccacgtgggacctgtctgctggtatgtgttaaacagcagaccggcccttctaccagatcttgatgcctctgattttctcctgcctacaagaaaatacaggcaaggttagtcaggtctggctatatttccactgttgtttcatttaataagatggcatctcctcttgagatatgttcttcttaccttttaagaagatactatttaagaagtgaactattcagtctttgtatactgaatgctttttccctaaaaaatgttaatcaagaatattgaatatttatggcactcttgatgctgcatttgaaagctgaaggaattactttagatagataggaattgctacctttattctggaaaggttttgtttctgcctcaaagcattttgaagtgttttaaccattaaagggtctaatttttttttcttaatgaaatcaagcattttaattcactgtgggaggcatcctgaccacggacatccataacagcaaagcacaaatcgttttcgtctgtagtcatatcctgaaacataggtggacaaatttttaactgagagacaaaaatcacatagttgaattgagcagaacacttaagtgctttctgcatctatttaggagtctatttcttaccaataaacttgacaacgcatttggaaaactagtgaacaccttacagctttcattttgctttaatgtttcaattcaagccggtgtaaaaataatttccaaggcatttctgtttattctttagtaatctcactactggctatgtcagcaatatctttttcaatctggttccttttgtatatgatgtcactgtgacctctttgaaatatagtgatggcttttacctactttgaaaagaattttcacatagagtcagaaaaaaaaggaaatatcaaatcacttgcctttccacttggagagcacgacagttgccaacaacaaggggtcaagggccgcacaggagatgtgtgggggcctggccacctcccacctgctgcccagaggcttgtttgcattttcattttttctccacttgtaacaaccatagtttcagctcctaaattcttatcatggatttacttagtcatcttaactgacctgcagttacttgcctgttttcagtgaagagagagaagcagctctggtgccacatgccagtgccatggagggaaatgaattctctgcaatctgttgtttcgctgattcatgaagaaagtaacaactgttgagtttcagccttgatggctgtcggcagttttctggtgtccacccaaacggagagacagtcactcctgcttaccctaatgtgtgactgagaagcagcctgggtgtgtaaagagatagtcattccccctgcctgtctcactgtagggtagcattatccactgtaaaaccatactactttcattttctgtggggagcaggcaaggcggaggtaaggtcaatctcaaaccccagaacctgggaattgtggtccagctccatgtcattcctcggaggctgagaactagagacagtctgcgactggcccanagtcacacagca

SEQ ID NO: 1018 - DNA, 3889 bp, Human
aaaaactcagggaagcccagggcccgtgttgtgcttttggcccaggtaggtggacagacatgtcccaggcgggggacgtagaaggccccagcacaggagaccctgtgctcagtccccaacacaactgtgagcttttacagaacatggaaggagccagctccatgccaggcctgtcaccagatgggccgggagcaagctctgggcccggagtcagggctggcagcagaaggaagatccccaggaaggaggcccttcgaggtggcagctcccgggctgcaggtgctgctgaggtccggccaggggtcttggagctgctagctgtggtacagagccggggctcgatgctggctcctgggctccacatgcagctgccctcggtgcctactcaggggagagctctgacctccaagaggctccaggtttctctgtgtgacatcttagatgacagttgccccaggaaactttgtagcaggtctgctggcctcccagagagagctctggcctgcagggagaggcttgcaggagtggaggaggtgagctgcctcaggcccagggaggccagagacggtggaatgagttctccagggtgtgacagaagaagccccacactcagcaaagaggagccccctggaaggcccctgacatcctcaccagacccagtccctgtgagggtaagaaagaaatggaggaggcaaggggctcattcagagtgtgaggaaggggctggtgacttcctgtggcttgatcagagccctcgtggggacaacctcctgtctgtgggagaccctccccaagttgctgacctggagtccttgggaggcccttgcagacctccctctccaaaagacactgggtctgggcctggagagccaggtggaagtggggcaggatgtgcctcagggactgagaaatttggatatttgcccgctacaggggatgggccccagccaggcagcccctgtggccctgtcgggttcccagtgcccagtggaggggagtccctcagttcagctgcacaggctcctccacagagcgcagcactgtgcctgggggcgtcagcacaggcctctgcagagcagcaagaagctgtgtgtgtcgtgcggactggcagcgatgaaggccaggctccagcacaggaccaggaggagctggaggccaaggctcagccagcttccaggggaaggctggagcaaggactcgctgcccccgctgacacctgtgccagctcccgggagcccttgggcggcctcagctcctccctggatactgaagccagcagggcctgctcaggcccattcatggagcagagaagatccaagggcactaagaacctgaagaaaggtccagtgccctgtgcccaagaccggggcacagacagaagctcagacaactcccaccaggacaggccagaggaacccagcccaggaggctgccccagactggaggaagtgaaaataccccatggagtgaagcttgtgtgctacctgggttccgggccagtgatccagctcctgggggccatcagccacggccaggcaggggggcagctgccaccaaagctggaggttctagaggacttgatggaggtcagctcaccctcacctgcccagaggctcagaaggaagaaaaggcccatggtgcagggccctgctgggtgccaggttttccagccttctccttcaggaggcacagcaggggaccctggtggcctctctgaccccttctaccctccaagaagcggttccctggcccttggcgaccccagctcggaccctgcatgttcccagagtggcccaatggaggctgaagaggattctcttccggagcagccagaggactcagctcagctccaacaggagaagccatccctgtatattggggtgcggggcactgttgtccgttccatgcaggaggtactatggactcgccttcgggagctcccagacccagtgctgagtgaggaggtggtggagggcattgctgctggcattgaggcagccctctgggacctgacacaaggcaccaatggccggtacaagaccaagtatcgcagcctgctgttcaacctgcgggaccccaggaacctggacttgtttctcaaagtggttcatggagatgtcaccccctacgacctggtgcggatgagctcgatgcagctggccccccaggagctggcccgctggcgggaccaggaggagaaaaggggcctgaatatcattgagcagcaacagaaggagccgtgcagacttccagcctccaaaatgacccacaagggcgaagtggagattcagcgggacatggaccagacactgaccctggaggatctggtgggaccgcagatgttcatggactgcagcccacaggccctgcccatcgcatcagaggacaccacggggcagcatgaccaccacttcttagaccccaactgccacatctgcaaggactgggagccctcgaatgagctgctaggctccttcgaagccgccaagagctgcggggacaatatcttccagaaagccctaagccaaactcctatgcctgctccagagatgcccaaaaccagggagttgtctcccacggaaccacaggacagggtccctccatctgggctccatgtgcctgctgcacccacaaaggccctgccctgcctgccaccctgggaaggtgttctggacatgttctccatcaagcggttccgggccagggcccagctggtctcgggacacagctgtcggcttgtccaggctctgcccaccgtgatccgctcggcaggctgcatcccctccaacattgtctgggaccttctggccagcatctgcccagccaaggccaaggacgtctgcgtggtcagactgtgcccacatggggcccgggacacccagaactgccgcctgctctactcatacctcaatgataggcagcgccacgggctggcctctgtggagcacatggggatggtcctgctgcccctgcctgccttccagcccctgcccaccaggctgcgccctttggggggcccaggcctttgggctcttcctgtctcccctctcctttccccaggtctggaggtcactcactcaagtctgttgctggctgtgctgctccccaaggaagggcttccagacacagcagggtccagcccctggttggggaaggttcaaaagatggtctccttcaacagtaaggtggagaagagatactatcagccagatgacaggaggccgaatgtgcccctgaagggcacccctcccccaggaggtgcctggcagcagagccagggcaggggcagtatagctccaaggggaatctctgcttggcagaggccccccagaggcagggggaggctctggccagagcctgaaaactggcagcatcctgggcgagggcagtggcccccagagccaggcttgcgccagtcccagcatccctattcagtagcaccagctggtcatggctttggccgtggccagcacttccacagggactcctgtccccaccaagccctgctccggcacctcgaatccctggcgaccatgagtcaccagctccaagccttactgtgcccccagaccaagagctccatcccccgccctctgcagcgtttgtctagcgcccttgcagctccagagccccctggcccagcccgtgactcctctttggggcctacagatgaagctggctctgagtgtcccttccctagaaaggcctgaccctccttacccaccagaacaggggttttgatgccctcactagtgttgaagcctgttccagagagaggtgggactgcaaggagaggatggtcagccctacccacctgccctgtttgagcttcctgtttgacaatgtttgctgttgattttttgttcaataaagaatttggtaaaattgg

SEQ ID NO: 1019 - DNA, 1581 bp, Human
cattcttgagtttgataaagtaattcatacaaagtattgtcctcaaataagtcttccttagctaaatgcaatttaaaattattcaaagatcctagggcacttctagtttcacgtaaatattcatattaggtggttctcttcatccatttgttttcacactgatacataaaaattaacagcagtctaatctagtgacacctcagtcatatttcgctatagattttacctcaaatcagtccaagactttttcagagatcaccatttgtcttgaaaggtttatttcgttattaaactgcctacttataagtaattaagagaaattaagaaagtagtatgcatttttaattgaaattgttttacattctttgtataataaacctaaaaacaaacatgtcataaacaaattgacgtaaagatataaaatgccaaatgaagtattccaaattttctattctaattatttagcttcaccatcattgtggaaaaaaatactagatcctgcttagtattatatatttttcctagtggatcagtgagtaataagtaccaaacactagactagaaggtaatttctacattgtttagaaagggtgaaacaatttatcccctctggtattgttctagcataagctttagttatacaatgattaagatagaaaacttcatatataaatttgataagcaaacccacatttatagctgcagctaaaatatgtttccttagggcacagtaatcctttctgtgaattttgaccttgtttgtgtttttgtgaatgaagctatatgtctaatcaaaaatgattataaaagaggctcatctctgacatcattccaaaaatacattcattgatctctttttaagaaacatctgttattcactgggcattgggactttttgtgagtaatttgaattgaaattttatgagctatccaagaattctgtatggtctattattttcaagtcaaaatttccagtaaggatttactttacatttcatttggataaatgaatcattatataggtatgtctttgcttccattttgagacatttagatttttacagcctgtttctatagcatttgatgttacaactctaagcgtagttcaaagacatttaaattgacaagttaccagttaaagaatttagaatatattagatcccatctagtattatatattttttctagttgatcattgagcagtaaataccaaatactcgattagaaggtaatttttacattgttttgaaagggtgaaacaatttatctcctctggtattattcttaaaccacagatagggatagtagggtagtgaaacgaataaatacctggtagaagacaagagacttgggctctacacctggctctgccactgatttgctaagtcatattggcaatcaccacacccttcagggaattagtttcatctgtaaaatgcagcggttagtactataaaatcatacaaatttctttgtgctttgagaatctataaaggaatgtctgttgatattctgagtcgattttcatttgcttttgttccagaacggttaaaataaagcatattatttcatttaaaaagt

SEQ ID NO: 1020 - protein, 19 aa, Human
ILEFDKVIHTKYCPQISLP

SEQ ID NO: 1021 - DNA, 3838 bp, Human
  unsure 3608: unknown base
  unsure 3609: unknown base
  unsure 3610: unknown base
  unsure 3611: unknown base
  unsure 3612: unknown base
  unsure 3613: unknown base
  unsure 3614: unknown base
  unsure 3615: unknown base
  unsure 3616: unknown base
  unsure 3617: unknown base
  unsure 3618: unknown base
  unsure 3619: unknown base
  unsure 3620: unknown base
  unsure 3621: unknown base
  unsure 3622: unknown base
  unsure 3623: unknown base
  unsure 3624: unknown base
  unsure 3625: unknown base
  unsure 3626: unknown base
  unsure 3627: unknown base
  unsure 3628: unknown base
  unsure 3629: unknown base
  unsure 3630: unknown base
  unsure 3631: unknown base
  unsure 3632: unknown base
tactaaaatgtagccccaaaatgacgggccagcctcagcgtatctgccatatgtatttcaaagattacagtcagaatgagttaatgaaaatggcaggttccttttcaaagtttatttgactcacagccatattgctaagtttgggtatagtgaagttaacaacaatcacttaaattaatatcttacagcaagatatactgatactgttttaaatgaaaaagactgtaaattcaatgtaaatattacctaactttatgtaccaagttaggagagtggaagaggggaatttttcaaaaaataagctgtatttgaacaaagcatgaaacttgttgttttaaaatttaagaataattgaatttaccatctaattggcatccgtactgtgcattgatagtaatatccaaatcatcttattcttccatagaggaagcgctcatataaatcacattgctgagaactatataaaactacatagaggtaaatggtgcttattaaatatgagtatagtttgttacttgctggaagtcttctagttcatttggaccattttcttaccctgaggtgaactcaatatctgttggcaatgggtggttaaatgtgaagtgcccttgttcagtgtcccttgttcttgtacaggtattttcttagtttaaaaaaaaaattctagcatgccaacatttgtctttggcctattcctttttttctgaagtgtgtaacttctgattttttctttgctatgttgtaaataacagtagctaaattctctgttttactatctacttttcttttcttcccagatcatttcattctaaaattaaattgcttggttttctttagaggaaattgctacatggtatacttgtagtagtgattcatattaaaaaaatagctggtaaatctttctaggtagtaacttatccaaacaatactttgagtatcatattttgtgaatgacttgcttaaactgggaaactgaatattctttttaaatcatataattcctgtattaaatgtgaaacacacagtctccaaagtcacctgattctctgtggaaaatgaaaggcattgaaggaaaccagatacattaatacttagttttggttgaaagtgcaacattactgtacttagaaggggcttggtttatttttagatatttaagctatcattaattttagaccaatggctaataataagagagatttttggttgctcatttatggagagacaaagaacagcatggcataaacaaacatcccagaaataaatgaaaagttttaagtgataaaattgtgttttctatgaaccagtgttgtacatgaaccaacattgtgtttcttagctctgacctgtacagtgaggtacctgtcaggacccctagtcttggcactggaaatgacaaagttctcctattactaaattctcatgccttccttttctgacttagtagattgaaattggtaggtactaatgatttatgtttgataaacttaagttctgctgatatcctgttactggtaattctggtaccaaaatttcaaacggtttgattattagtagcattttgagtacctaggtgcatataatacagttagcagacccttacagagtcaaaagagattttggaatctggtgatactgttgtttattacactagcctattacattttctttctttataataactgtttatgtgagtttcattgaaaatcgtggctctattgctttattcatggtttccacaactcttttgtaacaccttaattttctctcttaggtattttcctgttaaataagatatcaaaagcatcaatcacaagacagagaaaacgtattaggaaaaacttgtattagtatattctaaactgaaatggaaaaactcattattcatattttaataaataaaactcccaaatgatcttgctaaattatcccactatttagaagtagaaaataagagaagagtgctttcaaggaaatttgtcatattctgccttctatctagaagttgacaatgaattgcaataaaactaagaaataactgaatgctgaaaaataccatgaattaatgttatggcttctttatttttgtatatccattcccacaaaattgaatttaagattattaatgaaaattctatattaagtaataatgcttgtattagtaatgggcaaagaagtctttctttgttacattaaccgttagtaaaagatgtactttgacatttctgatgtaaaacctatatgtaaatattgtaatttaaatatgattggacagctgttaagttttggggagggaagcagatgccagcgttctctgctgaaaagacaagatggcgcttgacggaccacagcagatggagctggaggaggaaaaggcaggcagtggactctgccagtattatctgtccaagattgaagaactccagggtcaactgcaatataaattggatgggggaaagccacaaggaacagttctgaactccaggtgcatttgcagctgattttgaatgataagacccaaaacctctggaggcggcaggtgcacgggaatgaactaaatgttaaagtgtgcctattacaggaggagctacagctgctgcaggaataggactcctgtgtcagggaagtagtccaggccatgggtaagaagaaagtgttggtcaaggtgcatctcaaggacaagtttgtcatagatgtggacaaaaatatcagcatcagtgatgtgacacccagttccttggtggttctaagaaatgacagctacactttgcacaagatcctacccaacaaggtggactcattggtgtcactgatgatggtgaagaaagtaccagattcagcttatgaaatgattggtagactggataggcagatcaagaagatcaaagaagtgatcgacctgcctgctaagcatcccgagctcttcaaagcactgggcattgcacagcccaagggaatgctgcttggaagagactgttggcctgggctctggctcatcatagggactgtgtacctttattcatgtctctggctctgaattggtacagaaattcattggggaatttctgtgatggcagagaaaatgctcatctgtcatcttcatggatgaaattgactcttttggctcctcagagctggagggggatgctggagggaacagtgaagtgcagcagatgatgcttcgagggtggctttgaggccaccaagagtatcacggtttatcacggctgctaatacgattgatatcctggactcggcactgctttgcccagggcacattgacagaaaaattgaattcccaacctgcaatgagtaggcctggctggtcactttgaagattcattctcagaaatgaacctgacccaggggatcaacctgagaaaaattgctgagcttatgccaggagcatcaggctgaagtgaagggcatgtgcacagaaaccggcatgtatgccctgagtagcgagtccatgtcactcagaaggactttgaggtagtccaaagtcctatctcatgccaaaggacagtgaggaaaaacatgtccatcaagaaactatggaattgagggcacatcctttgtgtgtatccctacaataaaactcagtgggnnnnnnnnnnnnnnnnnnnnnnnnngttttggggagggatgatctgctagtgtataatcaataacttttaacatttagcttgtatttagtaacatttcattgtgttttgaaaaaaagtaaaaaatcttttgaagcacattttcatgatgtaaaaggtattgagtttcctagtgtaagaacatgatttctggaaacagtcttagggacctgggcagatagagcctccacccc

SEQ ID NO: 1022 - protein, 132 aa, Human
MGKKKVLVKVHLKDKFVIDVDKNISISDVTPSSLVVLRNDSYTLHKILPNKVDSLVSLMMVKKVPDSAYEMIGRLDRQIKKIKEVIDLPAKHPELFKALGIAQPKGMLLGRDCWPGLWLIIGTVYLYSCLWL

SEQ ID NO: 1023 - DNA, 1008 bp, Human
ccagcccagccctatggccaggcctttgactgtggatgagattgtgggccaggccttcatcttcctcatcgctggctatgaaatcatcaccaacacactttcttttgccacctacctactggccaccaaccctgactgccaagagaagcttctgagagaggtagacgtttttaaggagaaacacgtgagtacaagttggatccagttacccatgggatatccataggacaattgattttgtgtttgtgggagtgaaacttatttttaatgacttgctaatatcacattctaagcttataagatgaaatagggtcattgcttggcttctcctgctctccgggttagcaagcgaaatgaaatgttgagaacaataaccacaacaaaaagacaaattgtgtgtgcaccttcactgtctggggtagtccatgaagccaggcctggctcgaggaagctgtggaagcccaggaaggtgtcaggcccaaagggcagggatggggaaggagtcatggcttcccaatatctgacttggagctgccacacggagggaggcaggtgtgagccagaaaggagagccaagatagaaggcaggagtggacaaaaggacaggccaagctgaagctggactgaagactggaagctgaggaggaggctcacaaatggaataagggaagatggggcccgtcagcgcccaggccagcttcagggcattttcttctagatgaggcccctcttgatcgcttatagcagatataacgagggtgctgagcaaggctactttatcacctcattttttcctctagatgcttgtgtgtgtataactttgactcatgagttgtcaaagagattcatttttaaaatctgtactttaaaaggaagaccaccacagtggaatcctttctgttacattctgatatgattgctattacattcaccattttgaaaggtggtctgttctgttactggaaccattaaaaaatgtttcatacaatgaactgaaaaccaaacaaa

SEQ ID NO: 1024 - DNA, 5814 bp, Human
aggagccctcccagccctacccaaaccagcctactccctctcaagagctcacagctgcaggactagagccagatgtgccccggcaataaggacttcttccatggagaagcccctcaccgtcctgcgagtgagcctgtaccatcccacgctgggcccatctgcctttgccaatgtcccaccacggctgcagcatgataccagccctctgcttctcggacgggggcaggacgcccacctccagctgcagctccctcgcctctcccgccgtcacctgtccctggagccctacctggagaaaggcagtgccctgctggccttctgcctcaaggccctgagccgcaagggctgtgtgtgggtcaatgggctgacgctgaggtacctggagcaggtccccctgagcaccgtcaacagggtctccttctcaggcatccagatgctggttcgcgtagaagaaggcacatccctggaggcttttgtctgctatttccatgtcagcccttcacccctgatttacagacctgaggctgaggaaactgacgaatgggaaggcatctcccaggggcagcctccccctggttcagggtagcagatccaggttgcctggggtttctccacggcccttcccagacttgggacagccctctccagccaagacctggaggaggaacagaaatacagctccagagggaacccccagacagtgcactctgctagccctgccactagagcaagcctttgctagatgaaacaggatttgaaatacttgagctgcatcatgcaaggttgacaagcaaaacccactggctgccttgctcataatgaaccaattctccaaacaccgaacaaacagcccaggggggagaagcaccctctgtggccagagctatgcaatgtaatgggaacatcatatacttttagaggccctgaggggttctggggagcctctctcagcatttccacacatttctccctgttgtctgactaggagttactttatgtggttcattttgtgtgctgcttaagagcaggagtttgaggttgcaccaggaatgcgtggacacatgtaacaattacatttgtggtagcttggggttaccttcagctttcaaatacccacaggcacgcggggcttaggaaagcctgagtgtaataaactgcaagtatttcattaagctggcatacccaataggattccctgatccccagatgggccacatgcacgccacgctgtcatgcagacgtgggggtgggaaatatagacgaggtgtaagaggaaattggaaaggtgggactcacatttctggaaaggatgcaggcagggctcagggtttcctgaggatgggagctgggagctgggcctgcctggaaattcattgtcccccttatcatcctcatcctcacactccgcattctctgtcacttctggatcaaggccttggttgacttgagggcaaggtctttagggaatgaggggatggggtgggggtttgtgtaagaactcagcccagcagttatttcgctcagggtgagtcacacaccaatgggggtgggggaattccttccaaataagggactcgttaggagccaggtacgccaagggcaggaggattttctcggtgaacaagggcagcagctatttgccacgccatgctgagaaggggagagtgtggtttagaaacaacgttcactagtgtgatgcagggagggatctacatggtcaccatgatcccagaccccactctccagggaatctgaggcaccaagggcacagccctgttcccctggctgactcgaatctctgggtctgtagctgtcaacaatttctgttttctgcccaaaaggatgatcgttttgcacccagggcaagctacaaggaggtccaacttcactcacaggccctgagcatcttctccatcaggaaaacagaggtgggcaagacccaggcttgccctggtgtgggaagcttcctctccaatagggatgaagcaaaaacactcagatcacagccacaaggcagggagagcagggctgctaggaaggggctctctgatgctgtgaatgaccccttgggacccccaaagcagttcctcattcattcagcaaaccttcaccaagcacccaccttgtgccagatctgtgcaaagccacggaactgaaccagaagtgaataaggcaaactccctcagggagtttaccttgcactcaggaaagtcaagcattcaggagtgcattacttatttgatcactactatgattagtgctatagtcattgtatttttctctctcctccagctgggctcacattctcttgttaagtggccttgcctgttgagtgcctaccatgtgcttagcactctgctaggtgctgtgtgtattaactgcacttaacagataaggaaactgagacttggaaaggttacatatcttgcccaacatcacaccatcagtagctatgcgatttgggcaagtgatttagtctggctcttgcctctatttctcccgctggaaaatgggtaagataatagtactacctgctagagttacgagggtcttagaaggtgacacctgtaaagcattcaatcagtgcccagcacacacttaataagggttagctactatcatgagacctgagagaggagggctcaccatccacacggagctaaggaagactcacaccccagtaagctggctccagaacccaagggcttacctgtgctctgtgattccccaactagggatttagttgtagccacggacctggtaggcaacagggaggggattttaatctgctccttgcatcagaaggtccaataggcagggttagtataatgggagatgccctggtagggctggcaaggagaagaagccacatgtattttggtctgatgaaaagcagcagtgatctgtcactgaccaaaatggtcccccaactatgcattacggagcagcaacccacatacagaactcgagaagccacggcctggagactgtacctggacaccaaagactggagagaggagctggtggggaaaccccagagttcccagggtgccactccccagctccaccagagaactttgggaatgagctgctgcccctgagtgcccctctccagggcctcagtgagggtctctaccctccagggaggaacaaaaccttgccagctggggtcctgcgagagggggcagttcaattcctccacaggggactctgcaactccaatctttcgagtgaagcatctgcgaggccctcagggacccaggatgaactgcatagcagcagaaggaagacaggccagaccaggcgggagggagcccggaaacatctggtttgtagtttcagactctacccgttcacagttcacacagtctcaccgggaaactcacaccttgccctgtaccaagtttttaaggcagttaagctctgcccatccgagacttcatttttcttgagtagaaaatcactgaaatcatcagatccatggcacccaccttcactttctcctaacagctggaaccgtcaggctggcttcagggcctggtcttcgcacttgatatcactatccctcacctgctcagacagccagagcaggcgggtgagttcctcccaacaacctccactgcattctctcagctcccaccgcagggcagcccacgtgcctgagtgaacatgtgtgcgtgtgcacacacgcaagtatgcacagacatacactaaacacgaacatacagtgcacatgaacgctgctcccagctagggccctctggtcagactgctgcctgggttagaattcttgtccccacccccacttactatagttctgtgatcctggacaagtaactgaatctctccgtgccacagtttcttcttgtagaaaacgggaaagttcacagtacttacctccttagagtcattgtgaaggtcagtttgaggcatcacaaatttaaggcacccagacataagggtcaacagggttagctatcactgtccagtttggtgggaggaactgaatgcatgtaggcacatggacccagtctacactcaggcacaaaaggagctacattagttacattcaggcataccccagagcactacaattctctgagacattgtctggaaatctagaaatcatctccttgccctttaaggtattttaaccctcgcattcctctgcttttccaagaatgtgaatcttgccaagctgtccgtgagagacacgggctcccctcgagggagacttgcaaatgctccataaacagccacagtgtggggctctgccatgaggaagtcacagcagacacgctagacagcatagtcctggatgcaacctggaggaagggaggcccatggtggagcactcactccgtgcctgtctgcccggtgagacctcaagttccttgcagacaaaggccatgggttgttggctcttgtgttcccggtggcctttccagagctgaacagaggacagatgcacagacgggggggctctggtggtcaaggcagcagtccccttggatactaaagtctgagccaggcccctcaggcccggcatgggcagtgcgaggcccatagtggtgggaagccagttggccagctggggtgagaaggccgcgaagccatgggcagacaggaagtggaggtgaatgtctctgcctcctgtaggcctcagcagggacagcacagaccctctggctggggcagcgcagaccctctagctggggcagaacaaggctggtgcttccttctagtccttgagactttgtagctctaactcaagcagaaccctggggttttgggattctgtgtggtgactgctgaggaaggtttatggatttgacagggtgcatgtcacagagagacagttctcagtcagcacttcctgtcccctgcagaggctcataggggacagcccctgccaaggagaccctggaggggctctgaggatagcaatcagaggttgggctggctggactgagcccaggcctgttgcccaccaagtctccataggttctagtctgacccctctctccacccctgggctatgcaggccagcccgtgcagaccacccccgacgcgtccacttgcaacacccgcctcactgtgccaacactccatccacacaggaaaggactgagaacgtgatgcttaacccaaaggagtgagtttcataggatgggtggctttaacagtttcacagcaggacactgagggaatatttccctatcccttcaaatggacggtcactacagaaacgtgtagagcaagactttgtcaaggggctgtttccaggtctcccggtgtctaaatagcagagctggaatgggaactgagaaccgattctttccacaaccgcccactgagcagcaaggctgcagccagcaaagaggtgcggaggcaagcaagctccatgtggtggggacagcgcattgcgacctccaccacccctgcagtgggctgccagctgggccacctgtcttccactgtatctactgtacgaacttctccagctctgctctgttttctcttcctcagcatccaccccgtgacacgtagtggtggctgatgtcgccacagtaccatgaggttaacaggtcctccctccagcttccctcatggtggcagcctaacctgcattgcagccgttcaccggacaccgcaccagaccctcaaaacccatccaagactgtgggaggagtaaacaacccagcccagttaagaggagatgccgaatttaatgaaccctatttgaattgcagggctgtgattcctcttacctttaacgtgaactcacaggcggattaaagtgaaataaaacct

SEQ ID NO: 1025 - DNA, 88 bp, Human
cctgcagcctagtgccacttagtatcaattgttccttacgcaggctacagcgttgcggaccgctctagcgcatttttgtattcccgtt

SEQ ID NO: 1026 - DNA, 2562 bp, Human
atgtgctgcgagaagtggagccgcgtggcggaaatgtttctcttcactgaggagcgggaggattgtaagatactgtgcctttgctccagggcatttgtggaggatcgaaaattgtacaatttgggattaaaaggctattacatcagagacagtggcaacaattcaggagaccaggcgacagaagaagaggaaggtggttattcctgtggtactgcagaatcacatgacagcaaaggcataggcctggatgaaagtgaacttgattctgaggctgaactcatgagaagtatgggattgccacttcaatttggtaggataactgcacataaggattttgaggtatctatgaatactagaaataaagttaaaataaaaaagaaaaaacatcaaaagaaatacttagatgaaattgtgcaagaatcttggagaaaagaatatgaagaagacgacattttggcttcagatgatccatcttcaattgaacagtatgagaacaccagaacatatgaacttcaaagcaaaaaagatactgagacagaaaatcctccagttgaaaacacattatctccaaagctagaaattacagagaaatgggaaaagtattggaatgaatatggaggaggactattgtggcaaagttggcaagaaaaacatccgggtcaagcactatcttctgaaccttggaactttcctgatacaaaggaagaatgggagcaacattatagtcaactttattggtattatttggaacaatttcagtattgggaagctcagggttggacttttgatgcctcgcaaagctgtgatacagatacttacacatctaaaacagaagctgatgacaagaacgatgaaaaatgcatgaaagttgacttagtatcttttccatcttcacctattatggttgataatgatagctctggtacaagtgataaggatcatagtgaaatacttgatggaattagtaacataaaactgaattcagaggaagtaacacagagccaattagattcctgtacaagtcatgatggtcatcaacagctaagtgaagttagtagcaaaagagagtgccctgcttccggccaaagtgaaccacgtaatggaggaaccaatgaggaaagcaactcatcggggaatacaaacacagacccaccagctgaggattcacagaagtcttcaggagcaaacacaagcaaagacagaccacatgccagtggtactgatggagatgaaagtgaggaagacccacctgagcataagccaagcaaactgaagaggagccatgaactggacattgatgaaaacccagcttcagactttgatgacagtggttcccttctaggattcaagtatggctcaggacaaaaatatggtggaatcccaaatttcagtcatcggcaggtcaggtatttagagaagaatgtgaagcttaagtctaagtacctagacatgcgcagacaaataaagatgaaaaacaaacacatcttctttaccaaagagtcagaaaaaccatttttcaagaaaagcaaaattctgagtaaggtagaaaaattcctcacatgggttaataaaccaatggatgaagaagcatcacaggaatcatcttctcatgacaatgtgcacgacgcttccacaagtagtgattcagaggaacaagacatgtctgttaaaaaaggtgatgacctactggagactaataatccagaacctgaaaagtgtcagagcgtatcttcagctggtgaacttgaaacagaaaactatgaaagagacagcttgctagcaactgttccagatgagcaggattgtgttactcaagaagtgccagactcccgccaggcagaaactgaagctgaagtgaaaaagaagaagaacaagaagaagaacaaaaaggtgaatggtctgcctcctgaaatagctgctgttcctgagctggcaaaatactgggcccagaggtacaggctcttctcccgttttgatgatgggattaagttggacagagagggctggttttcagttacacccgagaagattgctgaacacattgctggccgtgttagtcagtccttcaagtgtgacgttgtagtagacgcattctgtggagttggaggaaataccattcagtttgccttaacaggaatgagagtgattgccattgatatcgatcctgttaagattgcccttgctcgcaataatgcagaagtttatgggatagcagataagatagagttcatctgtggagatttcttgctgctggcttcttttttaaaggctgatgttgtgttcctcagcccaccttggggagggccagactatgccactgcagagacctttgacattagaacaatgatgtctcctgatggctttgaaattttcagactttctaagaagatcactaataatattgtttattttcttccaagaaatgctgatattgaccaggtggcatccttagctgggcctggagggcaagtggaaatagaacagaacttccttaacaacaaattgaagacaatcactgcatattttggtgacctaattcgaagaccagcctctgaaacctaa

SEQ ID NO: 1027 - protein, 853 aa, Human
MCCEKWSRVAEMFLFTEEREDCKILCLCSRAFVEDRKLYNLGLKGYYIRDSGNNSGDQATEEEEGGYSCGTAESHDSKGIGLDESELDSEAELMRSMGLPLQFGRITAHKDFEVSMNTRNKVKIKKKKHQKKYLDEIVQESWRKEYEEDDILASDDPSSIEQYENTRTYELQSKKDTETENPPVENTLSPKLEITEKWEKYWNEYGGGLLWQSWQEKHPGQALSSEPWNFPDTKEEWEQHYSQLYWYYLEQFQYWEAQGWTFDASQSCDTDTYTSKTEADDKNDEKCMKVDLVSFPSSPIMVDNDSSGTSDKDHSEILDGISNIKLNSEEVTQSQLDSCTSHDGHQQLSEVSSKRECPASGQSEPRNGGTNEESNSSGNTNTDPPAEDSQKSSGANTSKDRPHASGTDGDESEEDPPEHKPSKLKRSHELDIDENPASDFDDSGSLLGFKYGSGQKYGGIPNFSHRQVRYLEKNVKLKSKYLDMRRQIKMKNKHIFFTKESEKPFFKKSKILSKVEKFLTWVNKPMDEEASQESSSHDNVHDASTSSDSEEQDMSVKKGDDLLETNNPEPEKCQSVSSAGELETENYERDSLLATVPDEQDCVTQEVPDSRQAETEAEVKKKKTKKKTKKVNGLPPEIAAVPELAKYWAQRYRLFSRFDDGIKLDREGWFSVTPEKIAEHIAGRVSQSFKCDVVVDAFCGVGGNTIQFALTGMRVIAIDIDPVKIALARNNAEVYGIADKIEFICGDFLLLASFLKADVVFLSPPWGGPDYATAETFDIRTMMSPDGFEIFRLSKKITNNIVYFLPRNADIDQVASLAGPGGQVEIEQNFLNNKLKTITAYFGDLIRRPASET

SEQ ID NO: 1028 - DNA, 1182 bp, Human
gctgcggcgcgcccagggcggtgggccctgttgcccatggccgggtgttgtctggagcagagcctagaagtctcatctcctggaagcttgtggttgttttattcacggtgttactgccaggaagtcttctgtaactagactcagggagcttaaagagcctgttctcccttctctcaaaagtggcttacggttgcccccacctggaagatattgaaagctattcacacagaatataaactagattttctccttcccctcgcctttttttcttaatttcatttaacatataatttatttttgaatatataaatctggaaatttttgtgcattaagatttccagaaaattgtttgataagcagtgacattattcccatacctcgagtccaaatacatttcgaaattaggagcagaaaataaaagcctgttggtaattgattcaatattttatactgtgaaataactaatgacttttaattatctgataaaatataaactagtgcccaaacatgaaatcaactaactgaaggtctttctgcctttggctacaaaagatatatatcgtatacacttattagaaagtattatatgattttgaatttagctgtttgatattgttggaattactgaaatgttcacatacagtcacatgagatgaaaaagaatatatatctatctgattttgtaactacaaagatgaattgccagtatatgttgcaagtgggttagatgcctttttttttaagaaggaaaactgttccaaatgtattttatatgaaaacattctttattccatcttttgaaatttggaataagacaaagttttcatgcttaaaaatcacagaatctactgaaggtatgctattattcctcgagtatttatgcaagctgtctgcatgatatcctgacactattctattaattgaacttgaatcgagcatttgtatctatcataggagtgaagtaatttattggccattgataagtggtttggctgcaatgtagaaactacagtatgaagtgttttatgtctgcattgtcttaataataaaaacaagaggtatttatagaaatatctattttcatgacattaatttcatggtaaaattgctccattatttgtgtggcacttctcttccttaaatacatgtccccttctaaatccaaatttcacatttttaaat

SEQ ID NO: 1029 - protein, 45 aa, Human
AAARPGRWALLPMAGCCLEQSLEVSSPGSLWLFYSRCYCQEVFCN

SEQ ID NO: 1030 - DNA, 435 bp, Human
  unsure 220: unknown base
  unsure 221: unknown base
  unsure 225: unknown base
  unsure 229: unknown base
  unsure 231: unknown base
  unsure 245: unknown base
  unsure 248: unknown base
  unsure 332: unknown base
taaaaataagtcgccagctctctcctttataaacagtctttagactggtttgtatcatgccccttgatgtaccagagatatgtttaaccaacctagttttgttgattctgacaatctcacacacatttaagaatttaccatttttcaggcacttttcaatgttaaaaaaaattaaatccaattattgaaaatcagtttgacaaacaacccccactccatnncccnggcnanaaaaaaaaaaaaanaanaacaaaagcagctaattcagtgatacaaactctgtaaggtggcaaattcccccaactcgccaaggaaatagcacatatttattntctcccatctttactccaaatttgggacctcttcctctgataacacagtcttttaggttacttgaaatcagcccccatttaaagactctttgcggcaccaagc

SEQ ID NO: 1031 - DNA, 1272 bp, Human
gagagttctggcgagggctgcgggaaggaaagggggcggcgtccttcacagggagggtgcagctgacctctctccccttgtgcagactggaaaagaatggcccagatcctctggactcctcagatgagcggattcagagagaagcttttgagagcgtgctggcagagacatttttcacagaagagcccttgcggtgctggtgtccgtggcgtgcctgggtggaaaatgagcttatatatgaagaagtcagcgagtggacaaagccaggcgcaatggatagcaaagatgtggaagtctcctcgattcaagttagaagaaaaccgcagcatggagtctgctctcagctgttggggaattaccgatgcctttgactaagtcaagactgacttttccagaatatcacccaagagatagagccgtccctgtccaagtttgtgcgctagcccttcatggaggtcagagaggaagaaacaaaggcagctgtggcctcggcggtcacagtgtcagaacgcacaagccccataaagaggtttcacgcaggccacccatcccttttcattctccagcagaacaggacagagagcgttctgttctgcggaaggtcttccactctacaaggcaatccctccagctgctttgctgtattgtgctgtctcctgtcacactatgaatgcagtgacctcagccagcaacagggagaacccccctgcctcccgaacaaaggacctcacgtgaaatcctgagctcagagcttacagatatgtgtgcgctttcactttacatcggccgtgacttccaaacaacttcaggaaactttaggatctctgaggtatactggagatgacagcagcgtagaatgttcatttggatttagaacagaaatgcttattttatatttggctgctcccaaactgtccccagacttcctctccagtggttaccctccactgccctggatgtcccacgtttacactccacactcacacctccaccttaacaaagtcctccactgggtcaaaccatacatcgcttcgtctctgtagtgatgacttcctgtcctctgctctgtggataaagaccccagataaagatgcctgtgttgctcaactcttgtaaatactcttgagacattttgaaagcagaaggaaaggagacagacggggaaaataaaagggatggtctgcttgtgcggaaacgttttgagaatgcccttccctaagagagaacagtaaaagtgagcaatacttcctgaaaaaaaaaaaaaaaaaaaaa

SEQ ID NO: 1032 - protein, 32 aa, Human
MDSKDVEVSSIQVRRKPQHGVCSQLLGNYRCL

SEQ ID NO: 1033 - DNA, 2171 bp, Human
atcacactgagagatttttaacatatcagtggggaaatggggttcttgaacctctggaaaacttgaagctgagattgttcaggggtccatgagtctgatgttggtaaacattcctcatgtacaagccaaagattatttgtataaattttggaatggtgatgtgaaccttaggtatgaaaaggcagtaacatataacaagaaaataattttctagatctggggcaacagtgtgcaaataatgtccccagtagagaagcaaatccttttcatggactctagggcttgctactctgagatacaatgcctctaatttcatgctatgtggctgctttgtctttgatcagatttagtgtcttaggtaattaaatcagaaagtctatttagctattctagaagtgtatgtgtaggtattgggtgggtggggttctttgagcgaacttgtcagaaactccattcttaacatcagaatcagggcaggattgaaaacattgtggctggatcttgaaattgctataacatctattgcagaaaatgataggtcagatggatagcaataataattatatatcagatcttagtaacaaaattaccaagctttatctagtggatatatgtaaaagaatatttttaaatgtccagcattgatgtattttctttaagaattattacagtatataagcattctttgggaatacagtataaaaacataaattttttcttatttttaattttttttatttttttgttcaaggatgaatcttccctttaaatattaattttctcttaatttcgtgtttccttgcacataatagcactgcccctaacttcagagatgctgattgcagttaaaaaatcaaaaagaaatgatgtgaatcagaaaataccatgttgtattgaaagcaaatcaaatagtgtaaacaccatcaccagaaaacctctgtgcgaacaagctcccaagaggagggcagcttgtaacttacaaaggctgttagagaactcagagcatcagagcataaagcatgtgggatccaaagagacacatttggaattccagtttggggatggtagttgcaagcacctaaacagtttgccaaggaatgtttctcctgagtttgttccttgtgaaggtgaaggaggctttggtttgcacaagaagaaagacctactcagtgataatggttctgaatcacttccgcattcagctgcatacccctttcttggaaccttaggaaataaaccctcacctagatgtacccctggtccttctgaatcaggatgcatgcatataacctttcgcgattctaatgaaagacttggtttaaaagtatataaatgcaatccactaatggaaagtgaaaatgctgcatctgagaaaagtcaaggtttggatgttcaggaacctccagtaaaagatggaggggaccttagtgactgcttgggctggccttccagcagtgcaaccttatcctttgacagtcgtgaagcatcatttgtacatggtaggccacaaggaactttggaaataccaagtgaatctgttaaatccaaacagttttcaccatccggttatctttcagatacagaggaaagtaatatgatttgtcaaacaatgaaatgtcagcgttatcaaactccatacctgtcagaagaaaccacgtatttggagccaggaaagatcagtgtgaattgtggacacccatctcgtcataaggctgatagattaaagtcagatttcaaaaaactgagcagtacattaccatcttcagtgtgtcagcagccttcaagaaaattaattgttccgctatctagccaacaagatagtggctttgatagcccatttgttaatctagactaattatggtacagtatttaagaagaatcattaatatattaacaaaaatggaagggaagacctcatactgaaaaaaattgtgagccctgcctcttttgagatgttttaataacatctgttatataagtaaagcattcttctaaaattgcttgagatatttatgttgccttaatattccaaaggcctgatggtgtatgtataatctgcttttgtgtggtgcttatttttggtttctaaaccatctatttttatacttataaattgactcactctgcagtgttaacttatttaaataaacttgcatatggtctgaaaaaaa

SEQ ID NO: 1034 - protein, 340 aa, Human
MLIAVKKSKRNDVNQKIPCCIESKSNSVNTITRKPLCEQAPKRRAACNLQRLLENSEHQSIKHVGSKETHLEFQFGDGSCKHLNSLPRNVSPEFVPCEGEGGFGLHKKKDLLSDNGSESLPHSAAYPFLGTLGNKPSPRCTPGPSESGCMHITFRDSNERLGLKVYKCNPLMESENAASEKSQGLDVQEPPVKDGGDLSDCLGWPSSSATLSFDSREASFVHGRPQGTLEIPSESVKSKQFSPSGYLSDTEESNMICQTMKCQRYQTPYLSEETTYLEPGKISVNCGHPSRHKADRLKSDFKKLSSTLPSSVCQQPSRKLIVPLSSQQDSGFDSPFVNLD

SEQ ID NO: 1035 - DNA, 988 bp, Human
gttcaaacagtgagcaaacacctgcatcatgcccttgatattatgtaaaagtggatctggccactaccaggttgcttctgacacttcatccctcttggagaaaaaaattcacctaaccccattcttaaatccagaagcccagagggaggggagggggcgttctgtgaatacctaaccagtgcctgaacagagaggaagttattatttaccaggggaaatggtgtgcctacataaagtttagctgctttaaaaagaaagtagaaacaaaactggcaaactggaaataaatgtcatgacttgatttaatactcaaactagcggttggacaaaatgcaagcagcttggtgagtattagtgtctgttcctgggtgggctctgagttgatataaggagagggaactgcaataactgaaatgttggagaagcagttagccgttctccgtaaagggtctgccaatcctggttttccatgacttagctatgactgccgatgaattctcaatgctcgtcacttccagggatcttcagatgttaagatgtttggggaaatcacaaagagaagagactgtgttgagacgcattcatccttaagcaaaagctgagagcctgcaaatgctggatgaaagctacaacctttctaaaaaccattaaatatagactttttcaaagagcatccaacaaagtagaatcctgctgtcaagaaaagccaaacttgggcaataggaaaaagtcacgggaaaaatagagtagctcatacaattacagaagtagaatgatttagggattttgagagagtataatccaattattctctaaactattcagggatctattttaatacttgatgatcctgattcttggaggaaagtctcatctgtgcttagttcttgttggtattttttgtttacttggcaacaataatagcaaattggtccttaagagagaacatagagctcttcagggccactgattaagaaggcatattttg

SEQ ID NO: 1036 - protein, 15 aa, Human
VQTVSKHLHHALDIM

SEQ ID NO: 1037 - DNA, 457 bp, Human
  unsure 135: unknown base
caggctgaagtccagtggcgctatttcagctcactgcaacccaaatgcttttcttctcatatagcacttaagtccttggatgatggacctacagctcttaagaatttccgtgtgtgtgtctgtgtgtgtgtggtnagcagaaatggaggtttcaaatgaaaacactggaaaaaaatgatttctcatctatccaattataataccaaaacagcaacagcagcagcagccaatgctgtcttaggtacccaggaaggtgaactagtgaaaatcatttgtactcaggagcactagatggcagcctgttatattcatcttacatattgaatctgtgcaaagtcagctatcagtctgattgccctatcccacaaattgcatcccaggagatgattagatgcaataggtgaaagttttcatgttcctcagtggcattcagtgcatgaacaaccattgtccacct

SEQ ID NO: 1038 - DNA, 2180 bp, Human
ggcacgagctgaactgaacctcttctttacaacgaaatgatgctcaagtctatcacagaaagctttgccacagcaatccatggcttgaaagtgggacacctgacagatcgtgttattcagaggagcaagaggatgattctagacactctgggtgctgggttcctgggaaccactacggaagtgtttcacatagccagccaatatagcaagatctacagttccaacatatccagcactgtatggggtcagccagacatcaggctcccgcccacatatgctgcttttgtgaacggtgtggctattcactccatggattttgatgacacgtggcaccctgccacccacccttctggggctgtccttcctgtcctcacagctttagcagaagccctgccaaggagtccaaagttttctggccttgacctgctgctggctttcaatgttggtattgaagtgcaaggccgattactgcatttcgccaaggaggccaatgacatgccaaagagattccatcccccttccgtggtaggaacgttgggtagtgctgctgctgcatccaagtttttaggacttagctcgacaaagtgccgagaagctctggccattgctgtttcccatgctggggcacccatggccaatgctgccacccagaccaagcccctccacattggcaatgctgccaagcatgggatagaagctgcatttttggcaatgttgggtctccaaggaaacaagcaggtcttggacttggaggcaggatttggggccttttatgccaactattccccaaaagtccttccaagcatagcttcctacagttggctgctggaccagcaggacgtggcctttaagcgttttcctgcacatttatctacccactgggtggcagacgcagctgcatctgtgagaaagcaccttgtagcagagagagccctgcttccaactgactacattaagagaattgtgctcaggataccaaatgtccagtatgtaaacaggccctttccagtttcggagcatgaagcccgtcattcattccagtatgtggcctgtgccatgctgcttgatggtggcatcactgtcccctcattccatgaatgccagatcaacaggccacaggtgagagagctgctcagtaaggtggagctggagtaccctccggacaacttgccaagcttcaacatactgtactgtgaaataagtgtcaccctcaaggatggagccaccttcacagatcgctctgataccttctatgggcactggagaaaaccactgagccaggaggacctagaggaaaagttcagagccaatgcctccaagatgctgtcctgggacacagtggaaagccttataaagatagtcaaaaatctagaagacctagaagactgttctgtgttaactacacttctcaaaggaccctctccaccagaggtagcttcaaactctccagcatgtaataattctatcacaaatctctcctgaggcttaccaacatctaaatgactttgcatttggggagattcaatgatttggtttgtaaagcaagggtctgctgcttggttttcccaggaaaaatgaacaaagatggagagagtccagaaacagaactacatatatctggaaggagccttctcctgaaaattttgcaggacagttccacttacctaaatcaagatgaaacacacacacaaaaatgagtttgtaagcattcacaagggtgaaattcaactcacctgtgatttacttataaaattaatctcttcataggaattatgtgtggacttcatgagcctcaaggttttagagggatgtgaacctgcatgtatattttctgacagtggagagggctctggtgcattgtgtcaccaacagatctcctagaccatggcttattaccaagccctccacagtgcaaggggtgctactggggaatgggtgggtttaaatcctgcctctgccattcactagatgtagccttgagcatgttaccattagccctctgcctcagtttccctatttgtcaagccgaagtaaaaagcagtctggaaaaatcgcattttggctctagaacccatggtcttaagcactgcaatatatcacctttcagtataaaaatatttgaatcagagttgcaataaagaatgaaaaggaaaaaagagaagtaaaaaaaaaaaaaaaaa

SEQ ID NO: 1039 - protein, 481 aa, Human
MMLKSITESFATAIHGLKVGHLTDRVIQRSKRMILDTLGAGFLGTTTEVFHIASQYSKIYSSNISSTVWGQPDIRLPPTYAAFVNGVAIHSMDFDDTWHPATHPSGAVLPVLTALAEALPRSPKFSGLDLLLAFNVGIEVQGRLLHFAKEANDMPKRFHPPSVVGTLGSAAAASKFLGLSSTKCREALAIAVSHAGAPMANAATQTKPLHIGNAAKHGIEAAFLAMLGLQGNKQVLDLEAGFGAFYANYSPKVLPSIASYSWLLDQQDVAFKRFPAHLSTHWVADAAASVRKHLVAERALLPTDYIKRIVLRIPNVQYVNRPFPVSEHEARHSFQYVACAMLLDGGITVPSFHECQINRPQVRELLSKVELEYPPDNLPSFNILYCEISVTLKDGATFTDRSDTFYGHWRKPLSQEDLEEKFRANASKMLSWDTVESLIKIVKNLEDLEDCSVLTTLLKGPSPPEVASNSPACNNSITNLS

SEQ ID NO: 1040 - DNA, 362 bp, Human
  unsure 90: unknown base
  unsure 159: unknown base
  unsure 160: unknown base
  unsure 276: unknown base
cccacacccttcctgggaaacagatacgtcccctgcccggtgatgacccaccatcaactgcatcctccaagctggattcctagacatctnttggtctcctctcttcctcactcccttcccccagtcagtcctgagtcctgccgtcagactctggcaggnntcccagaggagcatcaactccaggagaacagggatttctatcaatgtcattcactgctgcatccccagtgcctagaacagggctggcaggtggtaggcgcctgacagatgcttgtntgatgcctgaatgtctccttacccatgcccacggcacaggatagatgtgctatagggcaaagaactttgagggtcgagcagcaggg

SEQ ID NO: 1041 - DNA, 2148 bp, Human
gaattcgtcgctgctccagggaaagttctgttactccactgactctctcttttcctgataacatggccagcaagaaagtaattacagtgtttggagcaacaggagctcaaggtggctctgtggccagggcaattttggagagcaaaaaatttgcagtgagagcagtgaccagggatgtgacttgaccaaatgccctggagctccagcgccttggagctgaggtggtcaaaggtgacctgaatgataaagcatcggtggacagtgccttaaaaggggaagctggtggcagactccgccaagcacctgggtctgaagcacgtggtgtacagcggcctggagaacgtcaagcgactgacggatggcaagctggaggtgccgcactttgacagcaagggcgaggtggaggagtacttctggtccattggcatccccatgaccagtgtccgcgtggcggcctactttgaaaactttctcgcggcgtggcggcccgtgaaagcctctgatggagattactacaccttggctgtaccgatgggagatgtaccaatggatggtatctctgttgctgatattggagcagccgtctctagcatttttaattctccagaggaatttttaggcaaggccgtggggctcagtgcagaagcactaacaatacagcaatatgctgatgttttgtccaaggctttggggaaagaagtccgagatgcaaagactatctgtgctatagatgaccagaaaacagtggaagaaggtttcatggaagacgtgggcttgagttggtccttgagggaacatgaccatgtatagacagaggaggcatcaagaaggctggcctggctaattctggaataaacacgacaaaccagaggcagtacgggaaggaggcaaattctggctctgcctctatccttgattaccccggaagctttcgagaagctgggattccctgcagcaaaggaaatagccaatatgtgtcgtttctatgaaatgaagccagaccgagatgtcaatctcacccaccaactaaatcccaaagtcaaaagcttcagccattttatctcagagaaccagggagccttcaagggcatgtagaaaatcagctgttcagataggcctctgcaccacacagcctctttcctctctgatccttttcctctttacggcacaacattcatgttgacagaacatgctggaatgcaattgtttgcaacaccgaaggatttcctgcggtcgcctcttcagtaggaagcactgcattggtgataggacacggtaatttgattcacatttaacttgctagttagtgataagggtggtacaactgtttggtaaaatgagaagcctcggaacttggagcttctctcctaccactaatgggagggcagattatactgggatttctcctgggtgagtaatttcaagccctaatgctgaaattcccctaggcagctccagttttctcaactgcattgcaaaattcccagtgaacttttaagtacttttaacttaaaaaaatgaacatctttgtagagaattttctggggaacatggtgttcaatgaacaagcacaagcattggaaatgctaaaattcagttttgcctcaagattggaagtttattttctgactcattcatgaagtcatctattgagccaccattcaattattcatctattaattccttgatccttcatttatccattctgcaaacttttcttgagcaccagcacgggtggccatttgtggacttctcttcattcctatgtgttttcttatcaaagtgatccactctcgaaaggctcctttccagtctgtggttgggttcaagtcatgccagggccagggggcccatctcctcgtttagctctaggcaaaatccaggggatctgcagtggggagcgggggcaggaagctggagggaaggcctgtgaagggtagggatgtggaaagacaaggtgacagaaggacccaataggacctttctatatctctggcttagcattttctacatcatattgtaatcgtcttatttgctagttttcttccttactgtgagtgactaacagtcatctttatcccagtgcctggtacataataagtgatcaataaatgttgattgactaaatgaaaaaaaaaaaaaaaaaaa

SEQ ID NO: 1042 - protein, 125 aa, Human
MTSVRVAAYFENFLAAWRPVKASDGDYYTLAVPMGDVPMDGISVADIGAAVSSIFNSPEEFLGKAVGLSAEALTIQQYADVLSKALGKEVRDAKTICAIDDQKTVEEGFMEDVGLSWSLREHDHV

SEQ ID NO: 1043 - DNA, 647 bp, Human
ggtccgagggtctggatggtgagtccagggagcatgagaaattcatccaggccacacaggctcaggcacctatactcctgcccaccccctgcaggatggatattaccatttgaaatactttggcgcttgcagtgagatcttgcttaaaagaagaaacccaccaaattctagaatcgcagaggtgggggcacctatgtgacaaatgagggaacagaggcacagagattggcagggacatgctcaaagacatggagagcctgggcagaggatggccccagagtgggtggtgcctggccctgcttcagcctgacattgtccaagcctcccccagcccactcctaaaatggccaggccccacttcttcccaggtgggctacattttctgctgtcccggtcccacttccttaccttttctccttaaatctgatttcactgtgagggtgggaggttgggcagaggggtgaaaaccctcttccccttacttggtaagcagaaaatgtagccccacttcttcccaggtgggctacattttctgctgtcccggtcccacttccttaccttttctccttaaatctgatttcactgtgagggtgggaggttgggcagacggggtgaaaaccctcttccccttacttggtagcacatac

SEQ ID NO: 1044 - DNA, 838 bp, Human
aaagatgaagtcagcttaagttaaagtaagggaggcttggcttaagtcatgtagatgaagcctccaggtagcaggcttcagagagaacagatgatgaatttttctttttaggccttaaaaggtgtcagactctccagaaaagacctaataagagaaggagattctctacagaatgcagtttcccccacaagagacagctttgtagggccatttcaaaatacgtcaaataaatatattggggggtaaatttcctttggggcctgctgtcatgtgatgctataccagagtcaggttgggatttggtattttattgccacaaagggtctgtttggttagtcttaagatctctgttttaatgttaatgctggtcagttgtatttaaattccaaagggaagagggtaatatgaggcaccctgtaatctgaccataatatgaggcaccctgtcttcccatcatggactagtttttcaggttcctttgagatcccctgggccaagacaggggtccattcagccggttgggggatttagaatttatttttggtttgctgtatatatatgtatacacacactccccgcataaatgtaaaaattttaaactaccaattcctaggcaaagatgattctaacattctgttccttttgacaagtgtccaattagagaatgctgagaatgtcccctgcatatcggctctgttggagagcccctgatttttagcagacctgtttcattcaacatgggttacccaggaggtggtcttcataaaaatgtttcttggaggcccaggcgccgtggccccacggcctgtaatcccaggcacttttggggagggcccaa

SEQ ID NO: 1045 - DNA, 513 bp, Human
  unsure 4: unknown base
  unsure 102: unknown base
  unsure 116: unknown base
  unsure 251: unknown base
  unsure 396: unknown base
  unsure 407: unknown base
  unsure 408: unknown base
  unsure 438: unknown base
  unsure 496: unknown base
agcntaagtcccccacccatcggatcatctggaacttccgtccagagacgagagaccgactgggaatcctctcagtcaaggtccaaaccgaaaagaatcacnggcacggacaccanggctaaggccatttctaaaagactgctttctgtgttttgggtgaatccgtgtatttctgtatcacaaaatgactgactttgaacgttacgatttttctcctccttacgtgtacggtcctgtgatagacagaccangggactcctcggctcagagtccgtgaggccagaagctgacgtcccaaatttctatttagaatgagtttaagcacgccagccaaacgctctgccgtgaaactgtctgtcgggaagacaagcgggggaaggggaaagggggggtccnggcgcggtagnntcgcgcctgtcatccccgcacttttgggangccgagggccggtggatccctcggtccaagccttggcaacacggtgaaacctcgtctnaaaaaaaaaaaaaaaaa

SEQ ID NO: 1046 - DNA, 419 bp, Human
  unsure 63: unknown base
  unsure 68: unknown base
  unsure 77: unknown base
  unsure 99: unknown base
  unsure 107: unknown base
  unsure 109: unknown base
  unsure 146: unknown base
aggagtcctaggaccatctgggctctggagctcttcagccagccaccagtgcctcgttccccnttcangaatctccnacacaccctgtctccagggccnatgtcccntnagaacacagaccctctcctccgcccccacccactcantgaagggccgtgagcagcttggcagactgtccctcagtgtcacagtacaaaaacctcgggcgtagtggtacaggcaggagaatcttgcatgtagcagcttctcaataagtatttattgatttgtgatgcagtaaaggtcttagctcaccattttcctctggagttagtctgggtccttctattccttctgcttcctattctcctccttgtccttgcccataccaggtattggttcacattccttgaacgctgggttttacactctcatgttga

SEQ ID NO: 1047 - DNA, 404 bp, Human
  unsure 57: unknown base
  unsure 58: unknown base
  unsure 81: unknown base
  unsure 82: unknown base
  unsure 85: unknown base
  unsure 86: unknown base
  unsure 193: unknown base
  unsure 311: unknown base
cccacccagcagccgaggcaaaagggttcccaaagtggagaggagtaagagatcccnncccccaaacaggtaggaaagggnnaanntctccttcaaccaggaccccacccataggtacacacaaaaaaggggggatcgaggccagacacggtggctcacgcctgtaatcccagcagtttgggaagccgaggcnggtggaacacttgaggtcaggggtttgagaccagcctggcttgaacctgggaggcggaggttgcagtgagccgagattgcgccactgcactccagcctgggcgacagagtgagactcngtctcaaaaaaaacaaaaagcaggaggattgggagcctgtcagccccatcctgagaccccgtcctcatttctgtaatgatggatctcgctccc

SEQ ID NO: 1048 - DNA, 528 bp, Human
  unsure 472: unknown base
gcagcaatacttgagtgcctttcttatttaagaattagtggcaaatcacactgaaaaacaagacctgtcagttgttttataaatgcttttgaacttgatccctagttgagctccttccccctcagagtctgatacaaattaccctttattgtcagagtatttgctcattagtcctgtgaactctacattcagactcattgcttcctccagatagaggagcttgtaccataatattctgtgtccatttatgttagtttaatgaaatcttgcgaatttaggaaaataaaagaactgctcattcttccatatctttgtagtaacttctgttgtgtgtccttttgtagtcccatatttccatatccatatgctttgtaattcttttttctttcatgtcgttttctccattcttcaccaaaacagcagcatacataggcacatggttttatgatctgtttttcccactcaatatttnaaaaaaaaaatttgccatgttaggtaggctgggttcggtgtcttacatctgtattc

SEQ ID NO: 1049 - DNA, 448 bp, Human
  unsure 26: unknown base
  unsure 28: unknown base
  unsure 29: unknown base
  unsure 30: unknown base
  unsure 270: unknown base
  unsure 271: unknown base
  unsure 272: unknown base
  unsure 273: unknown base
  unsure 274: unknown base
  unsure 275: unknown base
  unsure 276: unknown base
  unsure 277: unknown base
  unsure 278: unknown base
  unsure 279: unknown base
  unsure 280: unknown base
  unsure 281: unknown base
  unsure 282: unknown base
  unsure 283: unknown base
  unsure 284: unknown base
  unsure 285: unknown base
  unsure 288: unknown base
  unsure 298: unknown base
  unsure 421: unknown base
  unsure 422: unknown base
ttcagacaccccttatgctccaaggncnnnatgtgagccagcggggggtgcatgggaaactgcaccccacaacccacatcctccatcctgactgcagcatggggttccccggcaggggtgggaggcagcaggggtcagcctgggcaggaacctctcccaactctgtccaggtgttcagacctcttggcccaacctgctcaccccaccgggttcactgtccttgtggggctggagagatgggcataagtcaggaacttgggaggaccaccnnnnnnnnnnnnnnnngangccctggggncctgccggaagggagccccctgctcctcccaacaaactccagaacagcagaaagcgggtgctgtagaggagcactcagctcacggggagggagctcttggctgagcttctacagggctgaganntgcgctttggggacttcagccttcct

SEQ ID NO: 1050 - DNA, 308 bp, Human
  unsure 170: unknown base
  unsure 171: unknown base
  unsure 172: unknown base
  unsure 173: unknown base
  unsure 174: unknown base
  unsure 175: unknown base
  unsure 176: unknown base
  unsure 177: unknown base
  unsure 178: unknown base
  unsure 179: unknown base
  unsure 180: unknown base
  unsure 181: unknown base
  unsure 182: unknown base
  unsure 183: unknown base
  unsure 184: unknown base
  unsure 185: unknown base
  unsure 186: unknown base
  unsure 187: unknown base
  unsure 188: unknown base
  unsure 189: unknown base
  unsure 190: unknown base
  unsure 191: unknown base
  unsure 192: unknown base
  unsure 193: unknown base
  unsure 194: unknown base
  unsure 195: unknown base
  unsure 196: unknown base
  unsure 197: unknown base
  unsure 198: unknown base
  unsure 199: unknown base
  unsure 200: unknown base
  unsure 201: unknown base
  unsure 202: unknown base
  unsure 203: unknown base
  unsure 204: unknown base
  unsure 242: unknown base
  unsure 283: unknown base
cactgtacgagtgaggcctgtgagagctgtgtcctgcaccgctcatgctcgcccggctttggggtcaagcagattgctacaggggtttctgataccatctgcgagccctgcccagtcggcttcttctccaatgtgtcatctgctttcgaaaaatgtcacccttggacaannnnnnnnnnnnnnnnnnnnnnnnnnnnnnnnnnnggcacaaacaagactgatgttgtctgtggtccccaggntcggctgagagccctggtggtgatccccatcatcttcgggntcctgtttgccatcctcttggtgct

SEQ ID NO: 1051 - DNA, 4283 bp, Human
cggtgtcgccgccgcggcgctgtcatggagctagcgcaggaagcgcgggaactgggttgctgggcggtcgaagagatgggggtgcccgtggcggcccgggccccggaatcgacgctgcgcaggctgtgtctgggccagggggctgacatctgggcctacatcttgcagcatgtgcacagtcagaggactgtcaagaagatccggggaaacctactctggtatggccaccaggacagtccacaggtccgtcggaagttagagctggaagctgctgtgacccgcctgcgggcagaaatccaggaactcgaccagagcctggagctgatggagcgagacactgaggctcaggacacggccatggagcaggcacgtcagcacactcaagacacccagcgtcgagctctcctcctccgggcccaagctggggccatgcgaagacagcagcatacgctccgagatcccatgcagcggctgcagaatcaactgaggcgcctgcaggacatggagaggaaagccaaagtagatgtgacctttggatccctcacgtcggcagctctgggcctggagcccgtggtcctgcgtgatgtccgaacagcctgcaccctccgggcccagttcctgcagaacctcctgcttccccaggccaagaggggcagcctcccaacccctcatgatgaccactttggcacttcgtaccagcagtggctgagctcagtggagacgctgctgacaaaccaccccccaggccacgtcctggctgccttggagcacctggctgcagagcgggaggcagagattcggtccctgtgcagtggggatgggcttggcgacacagagatatccagaccccaggccccggaccagtcagactccagccagaccctgccgtccatggttcatctcatccaggagggctggcggactgtgggtgtgctggtctcccagcggagcaccctcctgaaggagcggcaagtcttgacccagcgcctccagggcctggtggaggaggtggagagacgcgtcctgggatccagtgagaggcaggtgctgatactggggcttcggcgctgttgcctgtggacggagctcaaggccctgcacgatcagagccaggagctgcaggatgcagctgggcatcggcagctcctgctgagggagctacaggccaaacagcagcggatcctgcactggcgccagctggtggaggagacccaggaacaggtccgcctgctcatcaagggaaactcggccagcaagacccgcctgtgccggagcccgggggaggtgctagctctggtccagcgaaaggtggtccctacatttgaggcagtggcaccacagagccgggagctgctgcgctgtctggaggaggaagtccggcatttgccccacattctgttgggcacgctgctgcggcacaggccgggagagttgaagcccctgcccacggtcctcccatccatccaccagctgcaccccgcgtccccaaggggctccagcttcatagcgctgagccacaagctggggctgcctccagggaaggcctcggagctgctcctgccggcggctgcctctcttcgccaggaccttctgctcctgcaggaccagcggagcctctggtgctgggatctactccacatgaagaccagcctgccgccaggccttcccacccaggagctgctgcagatccaggcatcccaggaaaaacagcagaaagagaacctggggcaggctctgaagaggctggagaagctactgaaacaggcactggagcgaatccctgagctgcaggggatcgtgggggactggtgggagcagccaggccaggccgccctctctgaggagctctgccagggcctgtccctgccccagtggcggctgcgctgggttcaggcccagggggccctgcagaagctgtgcagctgaagagagggttcaaacggaagccgagaacttgacactgttcaccccaacacctcacctcccccaggacatttggaagaaagcagcgccaggattcctcggcagtcgtccccacccgcacctgcagtcccctcatgtgctgttctgctgccccactcagctcctggaccctgtcctttcatcccgctaaagcaccccctaaaaccccttcatcactttcattctcagcaaaaagtaattgagcacctcctctaggcgctggggagtccacactgaacaaaagaaacagaaaaccctgtcttccagcagttgagttctagggcagggagacagagtttacaagataaggaaaatatatatgtagtatgctgcaagttaactgctgtgtgggaaatccagcagggggtgggatgtgtgatttgaattgagggccacactgcccaggtcgtgctccgtcaaggggtgagcaggagcaacaggggtggctgagtaagggcttgcagctggaggcaacagcacatgcaaaggccctgagccaggatgtgctgcaataagggccactgagggggacagtgtaggttgggggtgaggaatgtattaaaagatgagattgccttctagtttgtatagtttctttttttacatgtaaatcagccatttggaatttatcctagcacatggatccaattttgtcttattttacatatatcctagtagcacttactgaaattcccagtcagagtggcagttgcctctgagggaaggtgggtggcagggatcaactgaggaggagacacagaaatgtcctagctgatgggaatgtgctgtgtcaagagcagcggcggtgacgcaggtgtagagatttgtcagagctcatgtagttgtagtcttaaggcctgtgcatttcactgcgtgggttactcaatttataaagcaaagcccttacacttttgagatgccacctttttatgcactaaatttccatgtttaattgggttatatctggcttctctccagacctgctttgtatttaactctccatgtgtcattcctacagtagcttaatagaaaggcttgtgacacattgtcatatctgttcttgttttcttttgttttttttttttttttttttgagatgcagtctcattctgttgcccaagttggagtgcagtggcatgatctcagctcactgcaacctccgcctcccaggttcaagccattctcatgcctcagcttccccagtagctaggattacaggtacgcaccaccacgcccagctcatttttgtacttttagtagggacggggtttcatcatgttggccagactggtctcgaactcctgacctcaagtgatctgcctgcctcggcctcccaaagtgctgggattacaggcatgagccaccgcgcctgaccacattgccatatctgaaatggctggattctcttaggtgcttttctttttctttctttctttctttttttgagacagaatctggctgtttcccaggctgaagtgcagtggcatgaactcagctcactgcaacctctgcctcctggattcaaacaattctcatgtctcagcctcctgaatagctgggattacaggcacccaccaccatatctggctaatatttgtattttttgtagagtcggagctttaccatgttggtcaggctgctctccaactcctggcctcaagtgattctatcgcctctgcctcccaaatcttcacctgctgggattagtttcccctgtctcagtaaatttttttttcccaaactaagtgaacattagatttaatttggctggccccagaagaaaaacatgcacagatggtagttttactggtgttgcagtaagttttcaaatttggaagtttggcagctttatgatcttgaaccttgctgtccatctctcacacaactcctctcttggcctccagagtccctttactctcccagctttcctcctgcccctggctgctgtttcccagcctttccacattggctttcccatgtagtccttagtgtgtctgctcctcctctctctcctcatcacagttcccagcccccaccttcaactgaactcaacaaaatcttcaacttcatacagtagtcacattgttagtaataacactggcatttttattttgataaaatagaccgtttaaatttttgagattctaccttatattttttgaattatatactaaagcaaataagtagtgatgtaatgtcattggggaccaagatttttagtgtaaatgaaaaaagataacaaatataaactcaagtaaacaccctgtagtctttcacatgaattggaaatatcagaataaagtcatgatttttctctttct

SEQ ID NO: 1052 - DNA, 3807 bp, Human
ggggggtccggaagtcaacaccatgtcaagtctgcacaagagccgaattgcagatttccaggatgtcctgaaggagccctcaattgcattggaaaagctgcgggaactcagctttagtggcatcccctgtgagggcggactgcggtgcctctgctggaagattctcttgaactaccttcccttggagagagcctcatggacctccatcctggccaagcagagggagctgtatgcccagttcctgagggaaatgatcatccagcctggcattgccaaggccaacatgggtgtgtccagggaggatgtgacttttgaggaccatccactcaaccccaaccctgacagccggtggaacacgtacttcaaggacaacgaggtgctgctgcagatcgacaaagatgtccggaggttgtgcccagacatttccttcttccagagggccactgactacccttgcctcctcatcctggacccccagaatgagtttgaaacccttcgtaagagagtggaacagacaacactgaaatctcagacggtggcccggaaccggagtggggtcacaaatatgagctccccacacaagaactctgcgccatcatccctaaatgagtatgaggtgctgcccaatggctgtgaggcccactgggaggtggtggagcggatcctgttcatctacgccaagctcaaccctggcatcgcttatgtgcaaggcatgaatgaaatcgtggggcccctctactacacctttgccaccgaccccaatagtgagtggaaagagcacgccgaggcagacacctttttctgcttcaccaacctcatggccgagatccgggacaactttatcaagagcctggatgactcgcagtgtggcatcacctacaagatggagaaggtttactccaccttgaaagataaggatgtggagctctacctgaaactgcaagagcagaacatcaagcctcagttctttgccttccgctggctgacactgctgctgtcccaggagttcttgctgcctgacgtcatccgcatctgggactccctcttcgccgatgacaaccgctttgacttcctcctcctcgtctgctgcgccatgctcatgctgatccgggagcagttgctggaaggggacttcactgtgaatatgcggctgctgcaggactaccccatcacagatgtctgccagatcctgcagaaagccaaggagctccaagactcaaagtagcccggcggcaagaggcccatgttcgggagagaagcctcccgaccctgtgccctggctcccgggacacatagaaacctgtaggaacccagcctgaggggaagccacaggatcggcccgagacccaggccatgcccactggggacacactgtgccgtgctccttcttctgccgccacgcccagctccccacctgccctgcactctgccctctttgcccaggatactgaggagggctggagctcgggaagttgtccttcctgggccagggccgtttctggcactgggaggctggcaggggcccctccctgcctcggctctgccgccccagcctcagttcctgcttctggtcttctcctgggctccactcaggggaggtgcttggccaatgggccagaaaccgcttctgagcggggcacttcggctgctccacagggaaggcgacactgaaagctgagtcctgccgtctgtctcacccacagatgtctgtagtcggtcggtgtgaatgtgggcccaagtccccaggcatcttctccgtgtgtgtgtgtgtgtgtgtgtgtgtgtgtgtgtgtgtgtgtgtgtgtgtgtgtgtgtgttagggagtgagggtctctcaggcctccaggtctcccagcccctccttctctgtctctacctctctgcctgtctccttccacctccttcccagagtgggactgtgtcttgcttcatgattcctctctccattactctccctgcccttctctgttggggtgccttatcctgagccacctcctctccccgcttgcctctgctcccctgaacctgggagacagatgaggagactggctcagcaaggcccctggaggtcaagcttggcctttgcctcctgttcccatcccccagccctggctcctaggtcctcccaactgggagggagtcctccgtgcctcacttagagggttctgaacccgttccctacacagaaatcttggaaaccaaatgctgctgagtaaggatgaagctttgagcctcctgcccctgctttctgcccagggagggagaaggaagagggggagctggtttttctggaggttcccccagaggccctcctgtccgaaaagaaaaggaccttgattctgagcccagggtcggaacccattgcttcagaagagttgtcattccctcggcttccaggtcccaacccagggttgggttgagtgagtcccacaaagggcaagtggggcccgaggaagcctctctggggccaggggtagctgagcttaaaggccctgggtcctgccagttccaggagggccatgtctgtgcctctgtgtacccctccacccgctgcgggctgagggaggtgcagggccttctctgacccctgcctgagctgttcccagggctggagcaggtgtaccctgagcaggggcagctggccactcccagttctcaccaagtcacctccctccttgtacaaggtttgcgtccggaagccgggtgccatagtgaggaccctcgtcctccagactggctggcaggagtcaggccccagcagccctcctgcccccaaagctttccgagtctggtgggcaggacttctcgctgcccttccaagcccggctttgggccaggaaaggcttccccaggtggctcttctaccaggcttttcctttgatgccgcctggatttccgcacctgcctgtctcctctcccagagcacagtatttgggagactttgactatttattcagactcctggctatgtattgcacattggcaagtgctctggggatgaggcatgggtataggaagggagaaaggagttggagacaagatcctcttcattttccaagatcaaagtcagcctcttctccccatgcttctaggaactgcctggttttcgagcaggtcctggctgagcgggctctgagttctgtactggaattgagtgtaaagatgggaagagaactgggctgactccaggacctccaggatgaggcagaggcatgatgcttcctgctcacctgggccaccctctctccaggacttgtcagctggtggttcagccccttctccaaccccttcataagcttgggccactgcctgggacccagcagacactgcccaggactctagtgcactcactcttgtctgccccctaccttccctcctggaaccacactacttgaatcaccattactttgcctcgctggcagagttgggtcaagtgccctctccttgaccttgagatgaaggtcaagagcacagggaccaggccttggttaggctgagctcccagcaggacaccgcctgcagaaaggacctgccctgataatgtcccttccccagattctcaagcagatgcccaagggaggtccccacagagccagagtgcctgaggcttcctgcttgagaacctgccccctggatcttggacacttacagattgagctgtatgaattcagcgggtctcactccagagggtcagaacgtttgctttagttttttcatctgttttgttccttgagtcagtgctgttgatgacgagttgtcttgaataaatcatgtgttctttgcaatgggcaaaaaaaaaaaaaaaaa

SEQ ID NO: 1053 - protein, 400 aa, Human
MSSLHKSRIADFQDVLKEPSIALEKLRELSFSGIPCEGGLRCLCWKILLNYLPLERASWTSILAKQRELYAQFLREMIIQPGIAKANMGVSREDVTFEDHPLNPNPDSRWNTYFKDNEVLLQIDKDVRRLCPDISFFQRATDYPCLLILDPQNEFETLRKRVEQTTLKSQTVARNRSGVTNMSSPHKNSAPSSLNEYEVLPNGCEAHWEVVERILFIYAKLNPGIAYVQGMNEIVGPLYYTFATDPNSEWKEHAEADTFFCFTNLMAEIRDNFIKSLDDSQCGITYKMEKVYSTLKDKDVELYLKLQEQNIKPQFFAFRWLTLLLSQEFLLPDVIRIWDSLFADDNRFDFLLLVCCAMLMLIREQLLEGDFTVNMRLLQDYPITDVCQILQKAKELQDSK

What is claimed:

1. Use of (a) a polypeptide of having at least 80% amino acid sequence identity to the PRO36124 polypeptide sequence set out in SEQ ID NO: 154, or to a polypeptide encoded by the full length coding region of the nucleotide sequence shown in SEQ ID NO:154, (b) an agonist of said polypeptide, (c) an antagonist of said polypeptide, or (d) an antibody that binds to said polypeptide for the preparation of a medicament for the treatment of an immune related disorder in a mammal.

2. The use of claim 1, wherein the immune related disorder is a T or B cell related disorder.

3. The use of claim 1 or claim 2, wherein the immune related disorder is psoriasis.

4. A method for determining the presence of a PRO36124 polypeptide having at least 80% amino acid sequence identity to the polypeptide sequence set out in SEQ ID NO: 154 or to a polypeptide encoded by the full length coding region of the nucleotide sequence shown in SEQ ID NO:154, in a sample suspected of containing said polypeptide, said method comprising exposing said sample to an anti-PRO36124 antibody and determining binding of said antibody to a component of said sample.

5. A method of diagnosing an immune related disease in a mammal, said method comprising detecting the level of expression of a gene encoding a PRO36124 polypeptide having at least 80% nucleic acid sequence identity to the nucleic acid sequence set out in SEQ ID NO: 154, or to a polypeptide encoded by the full length coding region of the nucleotide sequence shown in SEQ ID NO:154, (a) in a test sample of tissue cells obtained from the mammal, and (b) in a control sample of known normal tissue cells of the same cell type, wherein a higher or lower level of expression of said gene in the test sample as compared to the control sample is indicative of the presence of an immune related disease in the mammal from which the test tissue cells were obtained.

6. A method of diagnosing an immune related disease in a in a mammal, said method comprising (a) contacting an anti-PRO36124 antibody to a polypeptide having at least 80% amino acid sequence identity to the polypeptide shown in SEQ ID NO: 154 or to a polypeptide encoded by the full length coding region of the nucleotide sequence shown in SEQ ID NO:154, with a test sample of tissue cells obtained from said mammal and (b) detecting the formation of a complex between the antibody and the polypeptide in the test sample, wherein formation of said complex is indicative of the presence of an immune related disease in the mammal from which the test tissue cells were obtained.

7. The method of claim 5 or claim 6, wherein the immune related disorder is a T or B cell related disorder.

8. The method of any one of claims 5 to 7, wherein the immune related disorder is psoriasis.

9. A method of identifying a compound that inhibits the activity of PRO36124 polypeptide having at least 80% amino acid sequence identity to the polypeptide sequence set out in SEQ ID NO:154, or to a polypeptide encoded by the full length coding region of the nucleotide sequence shown in SEQ ID NO:154 said method comprising contacting cells which normally respond to said PRO36124 polypeptide with (a) said PRO36124 polypeptide and (b) a candidate compound, and determining the lack responsiveness by said cell to (a).

10. A method of identifying a compound that inhibits the expression of a gene encoding a PRO36124 polypeptide having at least 80% nucleic acid sequence identity to the nucleic acid sequence set out in SEQ ID NO:154, or to a polypeptide encoded by the full length coding region of the nucleotide sequence shown in SEQ ID NO:154, said method comprising contacting cells which normally express said polypeptide with a candidate compound, and determining the lack of expression of said gene.

11. The method of claim 10, wherein said candidate compound is an antisense nucleic acid.

12. A method of identifying a compound that mimics the activity of a PRO36124 polypeptide having at least 80% amino acid sequence identity to the polypeptide sequence set out in SEQ ID NO:154 or to a polypeptide encoded by the full length coding region of the nucleotide sequence shown in SEQ ID NO:154, said method comprising contacting cells which normally respond to said polypeptide with a candidate compound, and determining the responsiveness by said cell to said candidate compound.

13. A method of stimulating the T or B cell response in a mammal, said method comprising administering to said mammal an effective amount of a PRO36124 polypeptide antagonist, wherein said T or B cell response is stimulated.

14. A method of diagnosing a T or B cell mediated immune response in a mammal, said method comprising detecting the level of expression of a gene encoding PRO36124 polypeptide having at least 80% nucleic acid sequence identity to the nucleic acid sequence set out in SEQ ID NO: 154 or to a polypeptide encoded by the full length coding region of the nucleotide sequence shown in SEQ ID NO:154, (a) in a test sample of tissue cells obtained from the mammal, and (b) in a control sample of known normal tissue cells of the same cell type, wherein a higher or lower level of expression of said gene in the test sample as compared to the control sample is indicative of the presence of a T or B cell mediated immune response in the mammal from which the test tissue cells were obtained.

15. An antibody which specifically binds to a polypeptide having at least 80% sequence identity to an amino acid sequence of the PRO36124 polypeptide as shown in SEQ ID NO:154.

16. The antibody of claim 15, wherein said antibody is a monoclonal antibody, a humanized antibody or a single-chain antibody.

17. A composition of matter comprising (a) a PRO3614 polypeptide, (b) an agonist of said polypeptide, (c) an antagonist of said polypeptide, or (d) an antibody that binds to said polypeptide, in combination with a carrier.

18. An article of manufacture, comprising:
a container;
a label on said container; and
a composition of matter comprising (a) an anti-PRO36124 polypeptide antibody, (b) an agonist antibody of said polypeptide, or (c) an antagonist antibody of said polypeptide, contained within said container, wherein label on said container indicates that said composition of matter can be used for treating an immune related disease.
